United States Patent Application Publication US 2026/0191916 A1 - sequence listing, part 61

SEQ ID NO: 319 - DNA, 61891 bp, Alistipes onderdonkii
  source 1..61891: mol_type = genomic DNA
gccgaccgtcccgaccgtcaccagcgccacgtccgtaccttcgcggagcctccggccccggccgacgggcagcgcttcgaagggaacgccccgccacagacgtcccgcaccgttgccgcgcgggtagcggatcatgaagggatgaccgtattgcagaccggtatacatcatgttgcggagttccagttcatccatcggcgcagcgatcgtaagtcccggcacggcaccgaatgcagccatgtcgaagaccccgtggtgggtcacgccgtcctcgcccacgatgccgccccggtcgaggcacatcaccacgggcagatcctggatcgcgacgtcatggatcacattgtcgtaagcccgctgcatgaaagacgaatagatgttgcagaaaggcaccatgcccgcagcggccatcccggccgagaaggtcacggcatggccctcggcgatacccacgtcgaagcaacgcgacggcatggcgtgcatgagcatgttcatcgaacaacccgacggcatggcaggcgtgacgcccacgacccgcgggtcgagcccggccagttcgacgagcgtctcgccgaagacatcctgataacgcgccgcggcgcccggcgaggcgatccgctcgcccgtatcgggattgaaacgtccgggggcatgccacgtggactggtcgtgctcggcaggcaggtagcccttgcccttcacggtcatgacatgcagcaacttgggcccttcgatgtcgcgcaatgcccgaagcgtgcgcaccaactccttgaggttgtggccgtcgacggggccgaaataacggaaattgaagctctcgaagaggttgctcttgttcagcaccccctgtttcacggcgttgcccgccttttggcagaggcgcagcaggcgcggcgtatgcgaaaggatgccccacaaccgctgcttgaaacggttgtaatgcaccgacgtggagattttgagcaggtagttcttcaatgcgccggtggcctggtcgatggccatgttgttgtcattgaggatcaccaggatattggtgcgtttgctggccccggcgttgttgagcccttcgaacgcgaggccgccggtcatcgagccgtcgccgatgacggccacgacctggtgcctctcgccccgcatctcggcagccttggccatgccgaacgccgccgaaatcgacaccgaggcatgcccgcccccgaaagcgtcgtaggggctctccgacatgcgcgggaaaccgctgatgccgcccagcaggcgtttggtcttgaacgcctcgcggcgcccggtgataatcttgtgggcataggtctggtgccctacgtcccagacgatcttgtccgcgggcgtatcgaaaacgtagtggagtgcggcggcgagttccacgcagccgaggctcgacgccaggtgtccgggatttaccgagcactcgtcgatgatatagctgcgcagctcgtcgcagtaggtgcgcagttcctccgccgagagttgcttgaggtcgcggggggaatttatttttcggagtaatttgtattcatccaacgtcatggcagcacaaagatagcgcaaggagagcgacaaaccaaacttgtttgagttcgtccgaaccgcagcctatctaaaacgaggttaaagatagcacaagccgagcacaatgccaaatttattcggacattgccgaggcgaagcctgtgttccgtaaaacagctcagaccggacatggcgccgtttttttccggcatagccgccataccgcctattttctgtaaagatagtcattcttgcgtttttttcaataaaaatttttatcttcgcgttacggtaaacccatcgtacaatgaaatacaagcgaatactactgaaactgagcggcgaatcgctgcaaggttcgcagaaatacgggctctcccccgaagtactccagtcctacgccgaacagatcagggcggcagcggccacaggcgtccagatcggcatcgtcatcggcggcggcaacattttccgcggcctcacgggcgcaaagaaaggcttcgaccgcgtgaaaggcgaccagatgggcatgctcgccacgatcatcaactcgctggccctgcaatcggccctggaggacaacggcgtgaaggccaaagtcctgacctcgatccgcatggagcccatcggcgaatactactccaaggcgcgtgccatcgaatacctcgaggcggggtatgtggtcatcatcggcggaggcacgtcgaacccctatttcacgaccgactcggcttcggcgctgcgcggcatcgaaatcgaggcggacgtgatgctgaagggcacccgcgtggacggcgtatatacggccgaccccgaaaaagaccctgcggccgtcaaattcgacgaaataagcttcgaagaggtgctcgaccgccggctgaaagtcatggatctcacggcattcacgctctgccgcgagaacggactgcagatcattgtcttcgacatggacacgccgggcaacctcggcaaggtgcttgccggggagaggatcgggacacttgtaaaaaaataagattatggccacaaaaaagagcaacaagcagctatggatcatgctggcgctgatcgcagtgatcatcgccgcaatcctgttactgccctcgtgcggcagccgcggcggcaaagccgaggcggataccgaatcgaccacgctggtcaaggcgggcgacaaagcccccgacttcaccgtagagatgttcgacggcacaaaaacctccctcgcagaactcaaaggcaaagtcgtgttactgaacttttgggccacctggtgcccgccctgccggcaggaactgacccgcgtgcagaaggacatcatcgaccgtttcgccggccgcaacttcgtattcctgcccatatcgcgcggcgaaaagctggaagacgtggcggcgttccgcgaaaagacgggctatacgttcccgatgggcctcgacccctcgcaggccatttacgaccgttatgcctcgaattacatcccgcggaatttcctgatcggcgccgatggtaaagtcatgctggcaaccgtgggttacgacgccgaagagttcgacgaaatgatcaaaaccatcgaaaaaacactcgaataatatggataccaagacgattctcaacgatgcctccggccgtatgcagaaggccatcgaccacctcgaagaggaacttttgaacgtgcgcgcgggaaaagcgtcgcccaatgccctgaacggcgtaatggtcgattatttcggctcgcaggtgcccgtatcgggcgccgccagcgtcaccgtacccgacgccaagacgatcctgatccagccgtgggacaagaacatgctgcgtgcgatcgaaaaggccatcatcgactcgaacatcgggctgacgccttcgaacaacggcgagcagatccgcctgtcgatcccgcccctgaccgaggagcgccgcaaggagttggtgaaacaaatccgcaacgaggccgaaaccgcccgcatcagcctgcgcaatgcccgccgcgacgcggtcgaggcattcaagaaagcccaaaaagaaggtatgcccgaggatgagtcgaaggacggcgaagcacaggcccagaaattgctggagaaattcaccaagaccctcgacgaggcgctccaaaagaaggagaaggagatcatgacggtataaattcgtccagcacatagttaaaatccggccagcacagtatgttggccggattttttcatatctttgtccgttgtaacgatccgcctatgaaaaacatccgcttcgggctctgcatcccggcattcctgttcgcgctgttttgcacgcagcaggcatccccgcagggatatgtcaagctcaatgtcccctatgctctggtgggcgtggtgaatcccgccgtggagttcgccatctcgcccaaatcgaccttacagaccgacatcgtcatctcgccatggaagtcgatcaacgaaaagcacatgctcttcgccatcttcatgggcgaataccgccgctatttcaaggagcataaccggggctggtacctgggggcaaacatcggcatgatggccttcgacatgtcgaaaccttacatcgaagggtggaaactgaaattcgaagaccgttactgcaaaggatacggcatgatgatcggcctctgcgtgggttatgaataccagttcgggaaacgctggctgctcgacgctttcctgggttgggcatggatggacagccattacaacgggtacagtttcgacggccaggtcgacatgtacccccaccgccccgtacaacccgaacaccccgacccgttcaacggctcttcggagtggtatcccaacaagatcggcgtctcgatcgggtatcgcatcttcacgccccgcaacaaacagcggacagcggacgtgcgctaaacagcagttgcagactgcggcaggcagccatgcacggaaagtccgcaactccggaaccaaagggagcagtactcccggaatgcgggcaaccggaaacagcggccggcccgggaacctaaacccggggtaaattgcagcgggcccttccgaggcacacccgccacaaccccgccccggtcaggcggcaacccggaatcgcggcaggcagcaacccgccccgcgggaaacaggatccgagcccttccgaggatacggaagcccctcccatcgcagcatacgcaatgccgcaaaataaagaaccccgcaccttccggcgcggggttctaccattcaaaactttattcagagattatttcactttcgggccggcggctacgagcttcttaccctcttcgttacccgtgaacttcacgaaattcttcacgaagcggttagcgaggtcttcggccttgacgtcccaatccttggcgttcatgtaggtatcgcgcgggtcgaggatcttggtatctacgcccggcagctccgtcgggatcgtgaagtcgaagataggcagcgtcttggtcggagccttgtcgatcgaaccgtcgaggatggcgtcgataataccgcgcgtatccttgatcgagatacgtttgccggtaccgttccagcccgtgttcaccaggtatgccttggcaccggccttcttcatcttcttcaccagttcctcaccgtacttggtggggtgcagcgaaaggaatgccgcgccgaagcaagccgagaaagtcggggtcggctcggtgataccgcgctcggtacccgccagcttggcggtgaagcccgacaggaaatagtatttggtctgctcggcattgaggatcgaaaccgggggcagcacgccgaatgcgtcggccgaaaggaagatcaccttcttggcagccggggctttcgatacgggtttcacgatattctcgatgtggaagatcgggtacgaaacgcgggtgttctcggttaccgacttgtcggcatagtcgatcttgcccttcttgtctaccgtcacgttctccagcaacgcgttgcggcggatggcgttccagatgtcgggctcgttctcctgcgagaggttgatgaccttggcgtagcagccaccctcgaagttgaatacgccgtcgtcgtcccagccgtgctcgtcgtcgccgatcagctgacgcttcgggtcggtcgaaagcgtggtcttgccggtgcccgacaggccgaagaagatagcggtctcgcccttggcattggtgttggccgagcagtgcatcgaagccatgcccttgagcggaagcaggtagttcatgtaggagaacatacccttcttcatctcgccgccgtaccaggtgttgaggataacctgcattttctcggtgaggttgaaaacgacggccgtctcggagttcaggccgagtttcttatagttcttaaccttggccttcgaagcgttgagcaccacgaaatcgggctcgccgtatttctccagttcggcgtcggtcggacggatgaacatgttctttacgaaatgggcctgccatgcgacctccatgatgaaacggatcttgaggcgcgaattctcgttggcgccgcagaacgtgtccacgacatagagtttcttgcccgacaactcctgggtagcgagtttcttcagctccttccaggcagccttcgtaacgggcttgttgtcgttcttatattcatcggaagtccaccagatcgtatccttggtggtctcgtccattacgaagaacttgtccttgggcgaacggccggtataaacgccggtcatcacgttcacggcaccggtctcggtcagctggcctttttcgaaaccgcggagtcccttcttggtctcctcgcggaaaagttcgtcgtacgacggattgtacacgatctcggtcacgcccgtgatcccgtactttttcaaatccattttgtccataataattgctattttaataaaacatcaaatcctgatttacctaactcaaatccgaatgaccggactttaaccgcacaaaggtagaaaaacttttacacttgtgaaaaaactaacagtaaaaaaagcaaaaaaaatccattattttttccgataagcgtatatgattcatttataagcaggtaccgcatcccggacagtcgcacggaaagccggctcgataccctaccacaaacatacggccggaatccgcagcggcgcttcgcaggatggaattcgaggcggacgcataggccccgcttcggtcgaaacactcatcgacggcgcacggcatgcccgcccgacgaaacaccgccggacataagcaatgacgggagcggcgtctgcggggcaaccgcaacgcaatcagggaactggaagtattttccgacaatccgcccggcagccggaatgaacccgacgcacgaactccgaaaaaaccggaacgaaaggggacgatataccggaattttttctatctttgataagtcagccctataaaaacatcgttactcgttccgaataatgcgcccgataaaaatacgccacgacaggatctgcctgaaaccgttttcgatcgaatggataaactaccatagtttctccatcgtgttggttatttccgggacattcttctgctgttatttcgtctccgatctcattcacggattctgggatcggtactggctcgccgcgcttctgctattcggcgccggctttgccctctatacgatccaatgccggaaactgaaattcaagagtatcccgctctccgggcaacacgacggactgaaagagcagatacggaaactgctggccgacgggggatggaggatcgaatacgacaatcagcgttatttgcaggccgtaaaccgaaagggcatcccctttctggactgcgacctgctgatcttggggtggagaagcgacgaaatccggtgggccctggtctacgacccgtggtataacatggcggggggaatatttacgttcaacagatacggacggaaaaccgtaaaggcgataaaggcactcgccggcaattcggcggaagctcctgctccccggaaactcggatagaccatggccgggctttatttccacataccgttctgcaaacgcatctgcgcctactgcgacttctacaagagcgtccggctggagcagatggacggcgtaacggccgccatgcaccgcgaactggacgaacggcaggattacctgcgcggcgaagcggtcacgacccgctatttcggcggcggcacgccttcgctctacgcacccgccgcgctgaaagggctgctggatcatgccgcgcagttgttcgactgctccagcgccgcggaaaccaccctcgaggccaaccccgacgacctgacgggggattacctcgccgggctgcgcgaagcgggcatagaccggctgtcgatcggcatccagtctttcgacgacgactgcctgaagctgatgaaccgccgccatacggcggcacaggccatcggtgcggtgcgggcggcacaacgcgccgggttcggaaacatcaccgccgacctgatcttcggcattcccggcttcggcggggattcgctgaaaagatcgctcgacggggtgctgtcgctcggcgtacagcacatttcggcataccatttgaccgtcgaacccgatacggccttcggccgccgtgcggcacggggcgagttccgcgtcgtggaggaagaggtcagcgaggaggagttcctcacggtgcaccagacgcttaccgccgccggattcgagcattacgaggtttcgaactacgccctgccgggttttcgcgcccgccacaacgcctcctactggcatgggacgaaatacctcggcatcgggcccgcagcccactcgttcgacggcgaggagagacactggaatgcctgttcggtggaaaaatacatagcaggcgctcccgccgggaaggaagtgctgacccaacgcgaccggttcaacgaatacgtcatgacggcgctccggacggccgaagggatcgatctggaagaggccgcggcacgtttcggagcaaaacggctggcacggatgcaggaagaggctgcaccgttcctccgttcgggcacgctccgcatagaccgggggcggatggccctccctccggaaaaatttctgatctcggatgccgtgatcggagcgcttttcgaaacataacacgacatgcaacgatgtgaaacagaaatgttaagttattattaaatatttttactaactaaccagacaaggttgttttatataaatataagtattacctttgcagcggttttcaaccgattcatcgagtaaattacaaacaagcacgacaaatatgagtaatgcaaaactgactcccgactaccttttcgaggtgagctgggaggtctgcaataaggtcggcggcatccataccgtcatctcgaccaaagcacagaccgtaacccgtaaattcgccgaccgctatatcctcatcgggcccgacctccagcacgagggggcgaaccccgaattcgaggaagaccccgacatgctgaaggcatggcgccagagcgtatacagcgacggcctccggatccgcgtgggacactggaagatcaagggcgagccgacggtgatcctggtggactttacttcgctgatcccccgcaaggacgaaatactcaagaaactctgggagacgtaccacgtggattcgctctcgggacagtgggactacatcgagcccgtgctcttcggctatgccgcgggcatggtcatcgcctcgtatgtcgacaatttctgcaacgcgacggacaagatcgccgcgcatttccacgagtggatgaccgccgcaggcggactccacctgcgcaaacacgccccctatgtggccacgctcttcacgacgcacgccacggtcatggggcgctgcatcgccggcaacggcctgccgctctacaacgacctggccaagttcaatgccgacgaactggcccggcagttcaacgtcgtggccaaacactcgatcgagaagatggccgccacataccacgacgccttcctcacggtcagcgacatcacggccaacgaatgcaaatacctgctggggcgtgaaccggacggcatcacccccaacgggttcgaaaacgacttcgtatggacgggcgaggagtacgacgccaaacgtgccgaagcccgcacggcgatgatctcggtagccgaagcctgcctcgggcacaagttccggaaggaaccgctgatcgtcggcaccagcggccgctacgaattccgcaacaaggggctcgacgtattcatcgagtcgctcaaaaagctggccgcctccgaccgtctcaaacgcgaagtcctagcctatgtcaccgttccggccgccaaccgcggcccgcgtgcggacttgcaggcacacctggccgacccggccagcccgatcgacggcggacaatacaagtattcgacccattacctcgaataccagaacagcgacccgatcgtgaacgccctgaacggcagcatcctcacgaccgacgattcgaaggtgaaggtgatcttcgtgccgacctacctgaacaaggccgacggcatcttcaacaaggattactacgaactgctcgtcggtatggacatcacggtattcccctcctactacgaaccgtggggctatacgccgctcgaatcggtggcattctcggtgccgaccatcaccacaaccctcgcagggttcgggctgtgggtcgacaagcaacgcgagcacctgggcgtggaggtcatccgacgcgacgactacaacgacaaggaggtcgaggagaagatcgccgactcgctgctgcgcttcagcgcgctggacgagaaacatgtctccgagatgcgcgtttcggcctacgagatatcggaaactgcgctctgggagcaccttttcgccgcctacgaacaggcctactccgaggctgtcgaaagttcggtgatccgtaccaaccgcgccgtgctcgacgagagcaacgcccgcaacgaacagatcaatttcgtacgccagcagctcttcgccgagaagcccaactggaaccgcatgatggtcgacaaaaccctgcccaagcgcctgcatgccctggaagaactttcgcgcaacctctggtggtgctggaaccccgggccccgcgacctgttcgaaggcatcgacccggcactctgggccgaatgcgagcgcaacccgatcgctttcctcgacaaactgagcgtggaacgcataaaggggctcgaacgcgacgaggcctttctcgggcagctcgacgccgtatatgcgcagttccgcgactatatgaacgaaaaacccgccccgaagacccccacgatttcgtatttttcgatggaatacggcctgcactcgtcgctcaagatctactcgggcggcctgggcatactcgcgggagactacctcaaggaggcctcggacaagaacgtcccgatggcagccgtgggcctgctttaccggtacggctacttcacgcagcgcctttcggcacagggggcgcaggaagcgacctacgaggcacagaatttctataaactcccgatctcgcccgtgcgcgacgaagccggcaactggctgacggtcaccatcgccttcccggggcgtacgctttcggcgcgcgtctggaaatgccaggtcggccgcacggatctctacctgctcgacacggatttcgaggccaacctcgaggaagaccgccagatcacccactacctctacggcggcgactgggagaaccgcctcaagcaggaaatcctgctcgggatcggcggtatccgcgcactgcgtgcactgggcatcaagcacgacgtgttccactgcaacgagggacatgccgcattcatcggcatcgagcgcatccgcgacctggtgaaccacaagaagctctccttctcggaggcgctggaggtgatccgctcctcatcgctcttcacgacgcacacccccgtgcccgccgggcacgacgccttccccgagtcgatgatccgccagtacatgtcgcactaccccgacgtgctgggcatcacctgggagcagtacatcaacctgggcaagaccaaccccaacgaccccaacgagaagttctcgatgtcggtgctggcctgcaacctctcgcaggaggtcaacggcgtatcgtggctccacggcgaagtgtcgaaggagatcctgggcaacatgtggccgggttatttcaagaacgaactccacatcggctatgtcacgaacggcgtacacttcccgacatggatcgcgacgaacctgcgccgcctctacgcccgctatttcgccgacggcttcgaggggcacgcctacgacatcccggcatggcagaaagtccacaacatccccgacggggaactgtgggccgagcgcatgcatctcaagaacaagctcattaagcacatccgcaagcgttacagcgaccccagccaggtgcggctcgactcaccgcgccagatgttgcaggtcatcgagggcatcaagcccgacgtgctgaccatcggtttcgcacgccgcttcgcaacctataagcgcgcctacctgctcttcacgaacctcgaccggctctcggccatcgtgaacaacaaggagcgccccgtgcagttcatcttcgccggcaaggcccaccccaacgacaagccggggcaagacctcatcaaacgcatcgtcgaagtggccgccatgccgcagttcgtgggcaagatcctcttcctgcagaactacgacatggagctggcacgccgcatggtgcagggcgtcgacgtatggctcaacaccccgacccgtccgctcgaagcttcgggtacgtcgggcgaaaagtgcgtcatgaacggcgtgctgcaattctcggtgctcgacggatggtgggtcgaaggctacaaggagggcgccgggtggatgctgcccatggagcggaccttcgccgaccagcactaccaggacgaactcgacgccgagatgatctacaacaccatcgaggagcagatcgtcccgaaatattacgaccgcgacagggacggcgtaccccacgcatgggtggagtcggtcaagaaatgcgttgccgacatcgcatcgaatttcacgaccaaccgcatgctaaacgactacgaggaacggttctacaacaagctcgcggcacgcaagcaccggatcgtcgagggcggctacaagctggcccgcgagatcgcggcctggaaacgcaaggtctcgtcggtatgggatcagatccgcgtgatcgacgtacagcgcgtaaaaatcgacaacaaggcgatcttcgtaggcgaaaagtaccatttcgaagtgaccgtggacatcgccagcctgcgtcccgaggacatcggcgtggagatggtcattgcacagcagatcgttggcgggcagaatgccaacgtgatgcacacgatcgggctcaagcacaccaagaccgaaggcagccgcgttacctatgcactggattatacgcccgacgaagccggcacgttcgacgtggcgctgcgtattttcccggtgaacccgcacctgccccatcgcatggattttgcattggtaaaatgggcttagccaatttggccctaataatgtaaaaaagatatgaattttcggaaatgcgattgccttttcgcaaaaattcagctatctttatagaacgaaccgtatttttagaaggacatgtcagcacttactttcgacaaaagcgaattgggcaacctggagtattcgctccagcgcgagatgctctccacagaccgtatcggcggatatatgagcacgactatcgtctgctgcaacacccgccgctaccacggcctgatggtagcgcccatagacgacagcgacaggacgtatgtcctgctctcgtcgctcgacgaaaccatcgtccagcacgaccagacattcaacctggccctgcaccgcttcaagggggtatacgagccgcgcggacacaagtatatcaccgacttcaaatatacgccgacccccacgatcacctaccgcgtgggcggcgtgatcctgcggaaggagatgctgtggatacacaagcgcacgcagctgatgatccgctacacgctcgtcgaagcgaattcggaaacgcacctgcggctgcggcctttcctcgcctttcgcgacaaacacgcgctgacgcatgccaacatggaggccgacgggcactcctacccggcagtcaacggtgtgaaatgccgcctctacgggtcgttcccgtggctctacctgcagaccagcaagcccggtgcggaattcgtgcccgcgcccgactggtactacggattcgaataccagcaggatctggcccgcggttatgacggttacgaagacctgctcacgacgggctatttcgaaacggagctcaagaagggcgaaagcattatcttctcggcctcgctcgacgaaatgggatcggtcaagaccatcgaagaggtattcgccgcatccatcgcccggcgcacgcacaagatcgacttcatcagctgcctggagcactcggcgcggcaattcgtcatccggcgtcccggcgaccgcaccgaagtggtgtcgggctatccgtggcacggggtttcggggcgccaaaccttcgtatcgctcccgggcatcacgctcgaacaggggcataaggaggactgtatcgacgccctcgacacgctggtgcgcgaaatgcgcgacggcatgttcacgggcaacgcctcggcggccgtcgcggcagatgccccgctgtggttcttctggacgctccagcaactcgaacgggaggtgggcggcaagcagatatggaaagcctacggcccggccatgaaagatattctggaaagctaccgccggggagtcggcggccgcgtcgcgctgcatgacaacgggctggtgtgggccgctgcggacgacgtcccgatgacatggatgaacgccctgatcgacggccgccccgtcactccgcgcaacggttatcaggtagaggtgaacgcattgtggtacaacgccgtatgctacacgctcgagctggccggcaaacacggcgacaaagccttcgtcaaggcctgggagtcgctcccggcacgcacgcaggcgtcgttcgtcgaactgttccgcctgccggaaggttatctggccgatttcgtagggacggacgggcccgacaaatcgacgcgccccaacatgatcgtcgcctgcgggctggattacaagatgctcgacgaagagctgcaactggaggtgatccgcaccgtacgccagcacctgctcatccccaaggggctgcggacactctcgccccgcaacctgctctacaaaggttcgcaggaaggaggttcacccgcagagcgcgatttcgcgggcaagaatggttcggcatggccgtggctgctgcaattctacgtcaaggcatgtttcgatatcgacggggacgcattcctgccgcaggcccgggagatactcgccaatttcgacgaagacatccagagctacggtatcgggtctatttgcgagctttacgatgccgacccgccctacgcatcgcgcggcgctatctcgcaggcgtggagcgtcggggccgtgctcaatatccacagcatgatccgcgagcgtacgaaggaggaggcccgggaaagcaaaaccgcgaaggcggcgaaaagcaccgccaggaaaaccgcgacaaagacggccgtcgcaaaagaggccgcagaaaagaaacccgcagcgaaaaagagtgcggagaagaaaccgacggggaaaaagccggccgcaacaaaggccgcgacaaaaaagataaaggctgggaaataacaagttgtgaggggaggaaaatcctgccaaggcgggattccggggcgtccggacttgcaaccgcggcttgtggccgtgagccgggacgttcctgtgagaggaaaggtaaaaattgcaaaacaaggatatagttatgagagttttaatgttcggttgggagttcccgccccacatcgcgggtggtttgggaacggcatgttacgggatgacccgcgggctggcacgcaacgatgtcgacgtaacattcgtagtaccccatgcctacggcgacgaggatcagcgattcacgcacgtcctgaatgccagtgacgtggaggcgctttacggatctacgggaagcggcgcggacgatattctcgagaagatgtcgttcatccacatcgactcgaacatggtaccttatatctcccccgaagagtacgaacagtaccaggagcgctacgtcaaatccggacagaaagtctggtcgacgaccgatgcctggaaacaacgctataccttctcgggcaagtacggcgccaaccttatggaggaggtcgcccgctatgccgtagtcgcggcgcaggtggccaaagacctcgaagggcagttcgacgtgatccacgcccacgactggctcacctactacgccggtatcgccgccaagcgcgtatcgggcaagccgctggtcgtacatatgcacgccacggaatacgaccgcagcggcgagaacgtcaacacgcaggtctacgccatcgaacgtgcaggcatgcatgccgcagaccgggtgatcgccgtttcgaacctcacgcgcaacatcgtcatcaaccgctacggcgtcccggccgacaaggtcgtgacggtacacaatgccgtgcggttcgccgcaggccagtgcaaaatgcccgaacggggcgtggacgacaagatcgtcacgttcctggggcgtatcacctaccagaaaggccccgactatttcgtcgaggccgcggccaaggtgctgaagaaagtccccaacgtacgtttcgtaatggccggctcgggcgacatgatgaaccacgtcatccgccgcgtggcgcggctgggcattgccgacaggttccacttcaccggattcctgcgcggcgaggacgtacacaagatgttccagttgtcggatgtatacgtcatgccgtcggtctcggagccgttcggcatatcgcccctcgaggcaatgcgttcgaacgtcccggtgatcatctccaagcagagcggcgtggccgaagtgctcgactatgccgtgaaggtcgactattgggatgtcgatgccctggccgatgccatctacgggctgatccagtacccggcgcttgcggggatgttcgcctcgaaaggcctggaagaggtcacgaacctgaaatggaacgatgccgcagccaaaatcaaagccgtatacgaagcggcgatagaagagaataaaaaacaataaaatagctaccctatgaaaaccgtctgcttatattttcaggtacaccagccctggcgactgaagaagtaccgcttcttcaacatgggcaaggatcacaactatctggacgacctgctgaaccgctccatcatgcagaaagtcgcccggcagtgctacctgccgatgaatgccctgctgctgaagctcatccgggaaaataagggtaagttccgctgctcgttctcgatcacgggcatcgccatcgaacagttccgcacctatgcgcccgaagtcctcgaatcgttcaaggaactggccgccacgggttgcgtagagttcctcgccgagacttactcccactcgctggcctcgctggcttcgaaggaggatttcaccgaacaggtaaaactccacacggcacttataaaaaaggaattcggggtgaaaccgaccgccttccgaaacacagagctgatctactccgacgacatcggcgccgcagtggccgaaatgggcttccgtacgatgctggccgaaggtgccaagcacgtgctgggctggaaatcgcccaactatgtatacgccaacgccgtcaaccagaaactgcgcctgctgctgcgcaactacaaactctcggacgacatcgccttccgcttctcgaaccgcagttggaacgaatggccgctgacggcggacaaatatgtaaaatggctcgcttcggacgagactccgggcgaggtcatcaacctcttcatggactatgaaactttcggcgaacaccagaccgccgacacgggaatcttcgagttcatgcgcgcgctgccgaaggcaatcctcgccaagaaaaacggtctggagttcgcgaccgtcaccgaagccgccaagaaacaccagcccgtagcggtgctccactgtccgcacgtgatgtcgtgggccgatgaggagcgcgacgtgacggcatggctcggcaacgagttgcagaacgaagcgttctcgaagctttacgcccagaaggagaagatcgcggcactgaaaagccccgacttcgactatgtgtggagtttcatgcagacctccgaccatttctactacatggctaccaaatggctctcggacggtgacgtacactcctatttcaacccctacgattcggcctacgacgctttcatcaactacatgaacgtcctctcggatttcatcatcgaactggacaaggctgtggcggcaaaggccgcaaaggcgaaataacgggcgaaagaaaaatttacgacacaccaaccgaatagcgaaacagccgggatccgaggatcccggctgtttttcgtccatcagtctccagatgggccaaacaaccgcccgtaaaaggcaggaatatccgccgctgcccgatgcaacgacggatattccataagatgcccgggcattccgtgcctgcagcctagcgatcgcccgaaagccgcaatccgcgcgagaaccgcgaaccacacaagaaacgggagccgcacaaaagcctccccccccgaaaaaaccgggctccagggtaacgaacccacaatgcggatcgagagaacgcagggaaacttccgagcataaaaaaagcggcagaccgcgcctcttcggtctgccgcaggcaggagttttacttgaaagtgggagttgttgttaccaaaaaaatttgggatgtgcgacccctgccttagggagtatttcccgggttcccggcgctgctgcgaggcagcgccggattccgcggaaaggatcagaattagttagcaggctcttcggggtgcagctcgatcgtcacgttggcggtcatcgtgccccacttgtggctaacggtaaccgggatgaagagcttcacggttttctcgaccttcactccgttgatgttcttgaagacaagcttcgagccatccttggtgatgcagttcacaccgaaacggtcttcagccttgatcgtggcagtctgtgccgtgatcgtcccatccactacgtagttgccgctggcatctttcttcaggttggtcttggcattggccagatcccaagcgggggcattcactgcatagtaagcatagaggtcggaagcatatttctccttctcgtccgtaccggtcgtcacctcagccacgatgtagtccttgaagtcggtcatggtgaaggccttcgagcagtcaacctcggaaccgctgatgatctggtctacgaagtaggcgtcggtcagctcggtgttgatcttcagaggctcgacgaaatatacgttgaaatccgtcagctcgatgtggttataggggttgatcgcagcccataccttgagcgttgcctgctgcttcaggatcccgataccggcttcgttattgagcagctgtacggtgatgtcggcagcggcggcggtattgacggcacccgggttcgtggttgcgggagcataccagttgtcacccataccgttgtagttgagcttgacggcatccataacacccttcttcagcgtataacccgtcacgtcggtttcaccggcaggttcggcacccgtcagtgcgggagcgtaacccgtagcaggctgcttcttggcgaactggatatcccatttgccgcagggcagcaggttcgtgacgggcttgctgtcggcgaacagacggtcgagttcatagcggtatgcgcaggtcgcatatgcaccgggcgtattgtactggatcgggtaaacataagccagcgtgtaatcggagtgccagaacgaagagtcgtaaccgtagatcgaaggcagggtcggcttcttgatgttcacaacgaacgagaaggtcagtttgccctggtatacgttctgtgcagggatcgtcacattgacaaccttcttcacttccttgccagcaatcaggtcggcgatcacgttgccgatctgctcgggcgtcagcgtccaggtgaaggcggcagcggactcggcagcagtagcgtcgaagttgtaaagcagctcgacaccgtcagcagcggcctgggccacggtacctacggtatggtcggtagcggcgatttcgggagcagcataggttgcgatgaactcagcctgcgacagaccgttctcaccgagtttgccgagtaccttggtaaccatctcttcccaagtgaacgaacccttgaaggcatcgcaagtcaacgtgtagtcgaacgtcttgagaaccttcaggtcaaccggagcgatcttctccttcagccactgtaccttgaaataacgaacgtcaacgacggcgttcttgttgttcacgtcaaccagctcgacacgtacgatcggcgtcttgtcgatagcagcctggttgttggtcgtgccgtcgggcagtttcgaggtcagcgtccacgcgccgtccgtattggctacgctggcgaatttctgctggtcggtatcgttgtcacctaccttgtaaggcttggtcggcagtacgaagcggaactcgaggccggcagccttgagcgcttccttggtgatctccttggcttcatcatcgtcgatatagcaaccggtaaccatcgacagcaggtcgatcggcttgttgtatgcttcggtgaacgaaggatcggcagcctgtgcagcctcataatcagccgagaagtgatagtgatccgctgcttcatcgcactcgaattcaccgtcctcgctcttgtccgagttcaggtcgatcagggcggcgattttcggctcgatagccgtttcggtcagcgcaacatagtccgaatatacggcagtgcctacttcgccttcgccgaggtatttgtctgcgaggggcactttcagggcagccgtgtagatgtgttttgcatccagcgtaagagcggtacctgctgtcttcttcacgtctacggtcagcacaccgcctgcgatatcccacgaagcgacgttcagcagttgctcgctgacagcagcgcgcgtgcgaacttcagccttctcgaacacgaaactgggatccttgatatcctctttcgtaacgaccgaggggcttacgttgtagcgtaccgaagtagccgaagcagcagtcgtcgaggtcgtcgaaccttgtgtcacggtctcggccgacgcgctcgaggttaccttccatgcctcgtacgacagcgatttcagttcaatggtttcgatgccgttgacatacaggtcgggaatcagcagcacactggtcagacgaccggagatcatggcctgcaggtctgcgacagcatcgctgacagcctcggcaatggccttgttgatgaaaccgtcctctttcgtaatggcatcctcgaggtattgcttgatcttggtgtcgtagtcgttgatcgcctgggtcaacttggtctcattgacgaggttggccgaagcgacggcagcattgaacgacgtctggaatgcatccttgcaagcgtcgccggcagccgcgatagctgcgtcctttgctgcgttgatggcatcctgaatagccttctccgtcgtgaatttaccaagattgttcgtaacagccgctacggcgtcacccacatatttggtagttgcatacgaagagagcgtcgtgttcagatagctcttagttacataattgtccgcaaggtctttttcgatggcgtcgatgtccttctggagctggtcctgcgccttctccaaagcttcgatatccttggcattggcgtcagcgtcgctcttgagctcgtcgatccgttttccgagagcatcatcggcactcttcaggttgtcgacggctgtctgcaacgaaccgagctgcgactccagagtcgcaattttaccagtggtcaactcgtcgaggcggtcgttaagtttgtcgatgtcgtcgtcgtagtccttacaaccgacaccggctaacaatgttcccgtgaggaacagtgcaagaaattttctgaataagttttttttcatagtaatgaagaattgaaatggaattgttttttagtgttgacgcatttagttttatcaatagagtgacgcttgctatttctcattcgcggagcttgcctttttgtagtgtttcatagacttttcagaccatcaaacacgttatttgtattaagtgacgcattctttataattagttgacgcattaaattttccagttatgacaccatagttgttggtatcatatatgatacgcatggtgcaaatatatatataaaaatttgcacaacaaaatttttatccaaatttttgaaatgggagttgtttacgaggaggagatatcctatatctcttccaggatcagagagttgaggaaggagcgacgtctgacggtacaggaacttgcataccgttgcgacatggaaagatccaatttgagccgtatcgaagcgggacgtacgaaccttacggtcaaaacgatgtgtatcatttgtaatgcgctgagtgtgagcctgcgcgatgtaattcgctaaaagggatatacctatatttatatatcccggccttatcgtccgaagggttctttttttgggcattttcggtaatttatcgtatatttacgaccgaaacagaataaggtacagctatttgtgaatactatcgatttgattgtctgcctcatgctggtgttagccgtctggaacggttggcgccaaggatttgtcatgcaggtatgttcgttggccggaatcatcgcaggcatctgggttgcttcacgttacggtgccgaagtcggcgcatggctgaaacttgacgagacgatttcagctgccggaggattcgtcgtggtgcttctggcggtcgtcctgctggtagccatcgcaggacggctggtacgcaagttgtgccactttgcggggttcgggatagccgatatcgtactgggcatcgccgtatccgttttgaaatacatgctgctgctgagcgtcctgttttcggcgttcgacacgctgaacaaggactacaccctgataggggcccgtacgatcgagaaatcaaaaagttacaaacccgtcatgcgcctctccgagcgtattttcccgttcctggaatgggtcggcaaacaggtgccgcaacaagcacgggagcaggacgaagaatagccgatgggaaaacggttcacaggcgtggtgatacgcgccacagggagttggtacgaggtgctgcacgacggggaggccgtccgctgccgcatccgcgggcgcctgcgtctgaaaggcatccggtcgaccaacccggtggtggtgggcgaccaggtcacctgcgagtccgacgacgggggcgactacgtcatctgcgacatctgcccccgccgcaactatgtgatccgtcgggcttcgaacctttcgaaggagtcccatatcatcgccgcaaacatcgaccaggcattgctgctggcgacattgcgggccccggaaacggccacggagttcgtagaccgcttcctggtgacctgcgaggcctacaaggtgcccgtaacgatcgcactttcgaaagccgacctgcaggatccgtcagccatggcggaattccgcgccgtatacgaaggtgccggataccgcgtgctggaggtttcggccacggaaggtgtcggcgtcgaagcggtctgcgaactgctcgaaggccgcgtgacgctgttgtcggggaactcgggcgttggaaaatcgacgctcatacatgccatcgacccgtcgctcgacatccgtacgggggagatctccgacagccaccataaagggcgtcataccacgaccttctcgacgatgtacccgctggccgggggcggggcggtgatcgacacgcccggcatcaaggggttcgggctgatcgacatcgacgatgccgagctgtggcactattttccggagatgatgcgcgtcgcccctgagtgccgcttctacaactgcacccacactcacgagccggggtgcgccgtggtcgaagcggtcagggaggggaaaatcgcctatgcccgctacgagagttacctgaaaatcctcgatgatgatgaaaaataccgcaaataggaacaccgcctggtatggcgcgcgtacggcctgccttgcggagttcatgacacccgaacgcaatgaggtacttcgccgcacggtcgccatgcgtacacgctacatgaccgttatggcggaaaacatgtatcacgggcagaatgcagcggcgctgatccgccattgcgaagccttcggcatacaggagatgcacaccgtcgagacactctgcagattcgaccccaatcccgatatcgcccgcggcaccgaccaatgggtcgacgtgcggcgccatagctcaaccgccggggcgctcgccgcactgcgccgggacgggtaccgcatcgtggcgacgacaccccaccgcgaggatgtgacgcccgagactttcgacgtcacgcgcgggccgttcgcactggtcttcggcaccgagcacgccggaatatcggacgaggtcatcgccggggccgacgaattcctgcgcatcccgatgtgcggcatggtcgaaagcctgaatgtttcggcatcggccgcaatcctgatctacatgctctcggaacgggtacggctcacggtcggcgactggcgcatggacgaggcgcggcaggccgaagtgctctaccgctggatgatgtccagcgtgaaggacgccaagggaattctcgcccgcaaattcggaaacctaccatgaataccatcctcagaaaacaattcctggcccatgtcggccagacctcgccgtccccgatgctggtcgaggtggcgcgcgccgaagggtcgttcttctatactcccgaaggaaaacgctattacgacctggtcgccggagtatcggtgagcaacgtcgggcactgcaatcctgccgtcgtgaaggccgtacaggaacaggccgcgcgttacatgcacgtcatggtctacggcgagctggtcgaaacgccgcaggtggagtatgccgcaaaggtggcgtcgctgcttccgggcgggttgtcgagtctctatttcgtcaattcgggcgccgaagcggtcgaaggggcgctcaagctggccaaacgctataccggacgcacggagctggtctccatgcggcgtgcctaccacgggtcgacccacgggtcgatgagcatgatgggggctcccgaaggcgaggagtggaaaggagctttccggcccctgctgcccgacgtgcaggcaatcgaattcaacgatttcggggagttagagcgcatcacgcgccgcacggcatgcgtccttgcagaacccgtgcagggcgaagcgggcgtccgcccgcctgtcccgggctatctggaggcgctgcggcgccgttgcgacgaagtcggggcgctgctcgtattcgatgagatacagaccggcatggggcgcacgggagcgctgttcgccatgctcaaatacggcgttacgcccgacatcgtgtgcctggccaaggcattcgggggcggcatgccgctgggggcgtttgtctcgaggccggagatcatgcagaccctgcaggaaaaccccgtgctggggcacatcaccaccttcggcggacatccggtatgctgtgcagccgggctcgccgcgctgaattacctgctcgacaacaaggtcgtcgaaggggtcgaggcgaagggcgcactctacgcacgactgctcggcaaccatcccgccgtgcgtgaaatccgccgcagcggactgttgctggcggtcgaattgggcgagccgcagaaactctaccgcatcatggaactgttcaagcaggcgggtatcctgagcgattggtttctgttctgcgacacggcgttccgcatttcgccgccactgacgatttcggaggaggaaatccgcggaagcgcggcactgatcctcaaatgcctcgacgaattgggataggccgggcggccaaacgaaaaagagggtcggaaaccctcttttttcgtattacgccggaatctcccggccgcgattacccgcaattaaacatatgcggcaactattttccgacgacggcgcatgccggccgtaattttccgcatcgccgtgcctgctccggctgcggagtcaatggtttcctattcttcggccaatgacttgagcagggcgatctcctccggccagcgctgctcgtcgggggtttcaaggatcagcggaatgccgtcgaaacgcgcgtcctgcatgatgtagcggaaacattccatgccgatcatcccctcgcccaacggcatgtggcggtcgacatggctgcctaggattttcatggcgtcgttcaggtgcattccctttaggtattcgaacccgaccacgctttccagctccgcaaaggtcttgtcgcaggcctccgctgtccgcaggtcgtatccggcggcaaaggcgtggcaggtgtctatgcagacccccacgcgcgatttgtcttcgacccgctcgatcaggtaggccaggtgctcgaaggcaaatccgaggttcgaaccctgtccggccgtgttttcgatcacggccgtcacgccgcgggtcttgtccagtgcgatgttgatcgactcggcgatcaggtcgagcgaccgttcgggcgaaatcttttgcaggtggctgccggggtggaagttcagccggtcgagccccagcgcttcgcagcgctgcatctcgtcgaggaacgccgcacgcgacttctccagagcctcgcgttcgggatgtccgaggttaatcaggtacgagtcgtggggcagtatctgcgcgggtgtatacccgtacttgtcgcaggctttgcggaaggcgtcgatctgcgctgcggtgagcggcgcggccacccactggcgctggttcttcgtgaaaagggcgaagcccgtggccccgatcccgtgtgcattggcgggcgcgttttccacacctcccgcagcacttacgtgtgctccgatatatttcatatgattgtctctgtattaacttaagacaaagttaaggattttgtaaataatttcataaatttgcatattgaatttgcaattataatcgcttcactatgaaatatttttacctgcttttcgggctcattcccgcccttttggccggcaaccccgcgttcgcacaaatatccatcgacgaagtcgatgccaaagaggacaaagtgaccttccaggacaaactgaaatccacctccgtcgatgtggactatttcagcctggcccgttacaaggccgagcgcgccgcaatccgcaaggagcgcaactacctcgaattcagcggcggcatacagggttcactcacgtcgtacaacgacccgtggatctcggtctcgggcggtgacaactccattgccctgacggcggttttcgggctgcgccacctcttcacgaagaacctcttcacgctcgaaaccaagttcaatgccaagctgggctataaccggatgaaggtggagacgcagcgtctcgatgccgacggcaatccaatggtcgacgacagcggcaacaagattatggacagcgagggtatctggttcaaaaaccaggacgaattcgtgatttccgtcgccccgtcgttcaagatgtccgacaactggtcgtacggttcgatcttgaatttccgcagccagttcgtcaacgggtacaaatcgcgtacggaacaaaaggaggagcacctcaagagcaaattcatgaccccgggctaccttgacatctcgctcggtatcacctataaaagccccaaggccaaattcccgatcgtggtcaacatctcgccgatcgccctgaatgccacctttgcggagaacgaactgatccgcaaaacgaacggattcaactacggtatcgaagaccccgacaagacgtccaaatacgaaggcggttcgtcgatccagatcgacttcgaccgcacgttcggcaagactgggttcctgcgctaccgcacgacgctctactccttctacggctggatcaccgatatcggccagaaaaacaagatcagcgactattccgaataccggattgcttatgacgactgggtggagaaaggcagcgacatcaagaccaagccccgcctgccgatccacccgatcgtgcgctgggaaaatacgatcgacatcaaggcaacaaaatacctctccacgtcgttaagtttccagctttactacaaccgggcgcagaacctcgacgtgcagacccgcacgctgctgagcgtcggcctgacgtatacgttcaagaacaaggaaaaaccgcaaaaatagtccggccgccggccggcgtatgacacgcaaatgtataagaactcgaaatacaccgtcctcttcccgctgctgctggcagcgggtgttgtgttagggctgctgctggggcagtacatgggccgcaacagcaccacttcggagatcaagggcatgctccgccagatggcgctgcccaccaacaaactcacctatacgctttcgctcatcgagaaccagtatgtcgattcggtagcgatggattcgctcgccgagcacgtcatcccgctgctggtcaaggagctcgatccccactcggtctatattccggcatcggagatgcaggagatcaacgaaccgcttgaaggcgaattcgacggcatcggtgtggttttcaacatggcgaccgacacggtgatcgtgctgaacgtcatcccgcagggcccgagcgacaaggccggggtcaaggccggcgaccgcatcatcgagatcaatgacacgctcgtcgcggggcagaaactcccgcagcgcgacgtggtgaagaaactgcgcggcccgcgcggcacgaccgtacacctcgggctgggacgccagggtatcaccgacctggtgggcgtcgacgtcgttcgcgacaagattccgatcaaaagcgtagaatcggcgttctgcattgccgacggcatcggttacatcaagctgggacagttcgcacggacgaccttcgacgagatgcaggcatcgctggacacgttgcgtgcgcagggcgccaccaaacttatcttcgacctgaggggtaactcgggcggctacctcgaccaggccatcatggtcgccaacgaattcctgcacaaagaccagctgatcgtttacacggaagaccgccagcacaaacagctacgcgaatacgccgacggcacgggcgccgcgcaggatatggacgtagtggtgctgatcgacgagggcagcgcgtcgtcgagcgagatcctcgccggggcattgcaggataacgaccgtggtacgattgttggacgccgttcgttcggcaagggactcgtccagcgtcagatcccatacagcgacggatcggcattgcggcttactacggcgcgttactacacgcctacgggccgttcgatccagaaaccctatacgatcggcgacgacgaaagttacgaagaggacatctggaaccggtataagaacaacgagttcttctcggccgacagcatccacttcgcggattcgctcaaacgggtgactccgggcgggaaggtggtctacggcggcgggggtatcatgcccgacgtcttcgtgccggccgatacgaccgacgtaacgaaatattttgtcgaggtggcggggcgcaacatcctctaccgctacacgatcgaatatgccgaccgtcaccgcgaagccctgaacaaggtcaggacgatccccgaactccaggcgttgctggacagcgacaagggcctcgtggaggatttcatccgctatgcggcacgcaagggcgtcgctcccgattaccgggacatcgcccgctcgcgcaagctgatcgaagcccagctgagggcttatatcggccgcaacacggcgctggaggacaacggcttctacgccaacatctatcccgtcgacaacgtggtggtgcgtgccatcgggatattaaacgatacacagaaaaatgattaaaaaactcatcggtattatcgtggccgtggcggtgatcgtcatcgtcgtcattgcggctatccggcgcgacaatttccagtcgatgttattgcgcgacgagatcgaaaaccaaaccttcccggggccagtcgacaccgaccagccggcggtacccgtagcgggtgaaatcgaagtgacggattcggtaaccgtcgaggtggtcgattcgattcggtaatacctgtccggaaagcatacgggaaatacctcccgagggagggctttcgtaaataaccgattcctgacaccggataatatctgctggaaaatattattttcccggggaaaacggatcgaaatcacttcggatcgggattcacataacaggcagcagcccttgcaggggctgctgcctgccgtatacctgaaatccttcaaagagtccggactgccgcaccccgtatctttcccggcacgcacatgcagtatcgggcggtttcccgcatttatataggtagtccgtccctttcggccgcgactgcgaggtctgcacatatcccggccgcgggcagccaaagtacatcctccgtttgcatgaataatccgggctgcaccgacggccggggatattgttcctcgggatggggtggttctggccatcgggaatgcctcgcagatgtcgcaagccgtgtgtggaggaatttgaacaacctcatcccgtacagtcgaaagcgtatagcatgattttccccgtcgtatcgctcattcattcgtcaaaaaaatacagcagccctgcgggactgctgtatacggcctgggctcttccgaagatcagaaatatttgatctccctgccctcgatcgccgaaaggatattgtttgcggcggacgatgcaccaatgcggaacaggtcggtcgtaagccaatccttaccgagaatctcctcaacgatggtatagtaaagtgcgccgtcttcggccgtgcggactcccccggcagccttgaatccgaccttgcgtccggtcttctcatagtaatcgcggatggcctggcacatgacgaccgccgcctcgggagtcgctgcgacgtcgatcttgcccgtcgaggtctttacgaaatcggcacctgcgaacatcgacagcaacgatgccttgcggatcaggtcgggggttttcaacgccccggactcgatgatgactttcagtacgatgtcgccgtccatctcggaacggatcacctcgacctcgttcgccgcctcgtcgtattcgcccgtaagcatgcgccccacgttgagcacgatgtcgatttcatcggcgccgttctccacggccatcgccacttcgagggccttcacttcgaggaaggtctgggctgcagggaacccgccgcccacactcgtaatgcgcatcggagtgccatcgacggccagtcccacggtctcgacgaatgccggatagatacagatcgaagcgacattggggatatggggatatttctggtagaactcggcagccttgcgggcaaactccgtgaccgaagtcaccgagtcgttgcacgacagggtcgtgaggtcgatagccgagtagcacattttgtacacgtcggtattgtggttgcgtttcgcggcttcgcggatccgggcgacctcctggtctacctgggctgcgctccacgcgggagcatattcgttcagatggttggcgtattccataataatcgctgtttttacaaaattaggaaaaaatattcatacgcgcggttcccgtccgtaaatttttcccgtcataccggctatcctgcaaaaaaagagcctgaaccaccgggttcaggctctttttatcggttgacggcgattatttgttcagcgccttcaggttgatgtcgttggcagccttctgagccagtttcgggttcttcgaaacggcgctcttcagctgggcctctgcggtcttcaggtcaccctccttaacagcgataactgcacgcaggtagtcggcgtcggccgagttgtccttggagatagcctgcttggcggcagaaaggttgttgctcatcacctgggccacggcctcgttgtaaccgtcgaggttctgggcagcagccttgtagtcgccttcggcagcagcgatagcggccttggcctgtgcatcggcagccttggcatacttcttagcctcggcggtgttgccgttggccaggttgcccaggatgaggttcttggtgatttcgctcgacgaatccatcttggcagccttctcgaacgatttgagcgcagcagccttgtcgcctgccttggcctgtgcgatacccaggttgttgtaaacgcgggcgtcgttgtatttctttgaagcggcggtcaggatggcaacctgctcctcggctccgttggccagcgtctcggcagcatagaggtactcctccacggtcagctcctggccgttgcggaacgcagccatgatctcggcgtcggtcttgccctggatgtcggtgctgttcacgatttgcgaacgacgcagctcgggcagaacctcctctttgagttcgttgaataccgaagacatgttcttgatttcgctctcacgctctgcgggcgagttgtagaggctcagcacctggagaatgaggttcttgtccttgatgttcgacttctcgaccagttccttgaaaccgtcccagtcctcaccgtaagcggcagcgtcgatgtccaggcccgaatccttcagcagcttggcaacgactttcttaccggactcgctgcgtgacttcgacagtttgtcgttgaatttcacggggccatcgggcgaagcataacccttcacggcgatgttctgcgtagcacggtcgttctgcagtttggcatctacgtcagccttgaacgcgtcgaggttggctttcttctcgttcttcttggttacgaccgaagagttgatcgcatagagcagatcggtcttgtcgacgacggtggtcaccttcttgtagttgttggccatcggagccatcaggtcggagtatttcagatccttctggagcgtgttcagtccgtaagctacggtcaggccgaattccttggccagagcggccttggcagcctcgtcgttaccggccagcacggcagcctgctccttggtcgggatggcgccggtgttcaggttcacgagcgtgaattccttgcacttgccgcccgggcacttgatctcggcgcggagctgcagggcgcacttgtccatacggggatcgtaggggaactctacgtgctgcgtgaaattgcctccgttcttcttgtcgatgaccgtgtagttctcgtcgactttcgaaccctggagatatttggcggcaccggcaacctcgccaccgtcgaatacgatcacgggagttactttgataacggctttcgcgttgaaatacttaaccgggaacgtaacattgatgtcagcggcaacgataccgttgttcagcgtcagaatctcgggggtaaccgtcaggttgatgtcatcccggttcttggccatcttcttgaagcaattacagctcgagaataccagtgcggcagctacgagcacaacgctcaatttcattagatttttcataatcggttaatttaatgtgtttatttaaatgtttgcctttttatctgtctttcggccctgttcgtacggaattcgcggtattgcatcttccaactccccagccagaacaacgcaaatatagaaaactcttggtaattgtgcaatatttcaggcggaatttcagtacttttccgcccgaaaatatcacattagcagtcgttttactcttctttgcgttcaggacgtccgtggcgttcgtggcgttcgccgcgctcgggacgctcgccacgcggacgacgctcccgctccacataaccctcgggcttgggcagcagcaccttgcgcgacaatttgagcttgttggtcttcggatccataccgatcagcttcacgtcgatctcatcgccctctttcaggccggtctcctccatggtctcgaagcgcttgtagtcgatttccgagatgtggagcagggcgtccttgccgggcatgatctcgacgaacgcaccgaaggtgacgatcgaacggatcttgccgtggtacgtctcgccgatctccgggatcgcaacgatggccttgatgcggttcagcgcgccgtcgagtgcggtcttgtcctggccgaagatgtccacgatacccttattgtcgacctcggtgatcgtgatggtcgtacccgtggtcttctggatgtcctggatgaccttgccgccagggccgatcacggcaccgatcatatcctgcgggatagtgatctgtacgatgcgcggtacgaaaggcttgtagtcctcgcgcggttcggcgatgcactcggtgatcttgtcgaggatgtgcaggcgtcccttgcgggcctgctccagcgctgcggccagcacctcgtacgagaggccgtcgaccttgatatccatctgcgtggcggtgataccgtccttggtacccgtcaccttgaagtccatgtcgcccaggtggtcttcgtcgcccaggatgtccgacagcacggcccacttgccgctctgcgaatcggaaatcagccccatggcgatacccgagacgggctttttgagtttcacaccggcgtccatcagggccagcgtgccggcgcagacggtagccatcgacgacgaaccgttcgactcgaggatgtccgatacgatacgcacggcgtaggggttctcctcacccagcggaaccatcggtttcagggcgcgccatgccaggtggccgtggccgatctcgcggcggctcaggccgcgtgcggccttggcctcgcccgtcgagaagggcgggaagttatagtgcagcacgaactgctcggtaccctgtaccagcacttcgtccttgactttttcgtcgagtttcgtaccgagcgtaacgctggtcagcgactgcgtttcaccgcgcgtgaagatcgccgagccgtgggctgcgggcaggtagcccacctcgcaccagatcggacggatctcatcggtcttgcggccgtcgaggcgcttgccctcgtcgaggatcatgttgcgcatggcctttttctgcacgtcgtcgtggaaatatttgtggatcagcggggctttctccgccagttcctcctcgctgtaacgcgctgcgaactcggcctcgagggcgttgaacttttcctcgcgctcgtgcttcatcgtgccgctcgtggcgatggcgtaagccttgtcgtaaagctcgctgataatcgtctggcgcagctgttcgtcgttgacctcatggcagtaggtgcgtttcacatccttgcccagttctttcgcgagttcgatctgtacggcgcagtgcttcttgatctcctcgtgtgcgaacttgatggccccgagcatcacctcctcggaaacctccttcatctcgccttcgaccatcaggatgttgtcgatcgtaccgccgaccatgatgtcgaggtcgaccttgcccatctccgaatagttggggttgatgacgtagttgccgtcgatgcgtgccacgcgaacctccgaaatggggccgccgaagggtatgtccgaaacggcgagggcggccgaagcggccaggcccgccagggcgtcgggctggatatccttatccgccgagatgaggttcaccgttacgtaaacctcggcgtggtaatctgcggggaacagggggcggagggctcggtcgatcaggcgcgcgacgagcacttcgctgtcgttggctttgccttcgcgcttcatgaagcctccggggtaacgtccgcaggcggcgtacttctctttgtattccacctgaaggggcatgaaatcggtgtcgggttttgcgtccttggcggccaccacggtacccaggagcatcgtgtctcccatcttgactaccacggagccgtcggcctgcttggccagtttgcccgtttcgatctcgatctggcgtccgtcggccaacgtgatgatcttgcggactgcgttgtacagcttcttttcttccataaaaatctaaacctataatgtttttcgaatcgttgtcctttacgaaaatgaaggcaacccctcgttgggaattgccctcatttctccctcgcggattatcggcggaggttgagcgtcttgacgatggcgcggtagcgctcgatgtcgacctctttcagatactccagcaacgcgcggcgcttaccgaccaggcgcagcagtgcgcgctgggttccgaagtcgtgtttgttgctcttgaggtgttctgtaaggtggctgatacggtacgaaaacaacgcgatctggctctcgggcgaacccgtgtcggtgttagacttgccgtactggccgaaaagctcctgctttttctctgctgttaaataagccatttttgaaagtttatttaaattccactctacgacgcatcccccttaccgtggataacgccagagcgtccggcaaagttacgaaataattgacaattaagcatggcaaatgaaaaattatttaccttttttacacggatttatcgccttaaactccggaaaatactatttttgcggcaaaacaagtctacgttatggtaaagacgcttattttcgcactcctcgcgacgatgtgcgcaaccttcctgtggggctgcggcggcaaggtttcctatacgaccgtcgacgggacgatgctcggcacgacgctgcacgtggtggccgacgtgcagggcacttcgccgcaggagctctacgccgccgtcatggcgctcgaccgggaggccaaggcctcgatgtcgatcttcgacccggcgtcgctgctgagccgcctgaaccgcaaccagaccgacagcgtcgaccgccatatcgccttcaacctccgcctggccgacagcatcagctcgctgagcgacggccgttacgacgtgaccgtcaaaccgctcgtcgaagcgtggggcttcgccgggaaagaggcgcaggagaacccgaacgtcgattcgatccttgcgttcgtgggccgtcaaaaggtgcgcatcgaaaacggccgcctgataaaggacgatccccgtgtgcagctggatttcaattcgatcgccaaaggatataccgtcgacctgctcgcgcagctcgtcgaatcgttcggcgccaggaactacatcgtcgacatcggcggcgaagtccgctgcaagggcgtcaaccggcagggggatccgtggcgcatcggcatcgagaccccgttcgacggcaacatgtcgaacggcgaatacctccagcggcgtatcgggatgaccgaaggcggcctggccacctcaggcaattaccgccgtttctacctcgatgccaaaggcaacaagatcgcccacacgatcgacccccgcacggggcgcagcgccgtttcgcgcctgctgtcggtgacggtcgcggctccgacctgcgccgaggccgacgccctgggaaccatgttcctggctatgggggccgacgatgcgctggccgcggcgaagtccatgccccggatgaaggtctatttcatcctcgccgacggcgcggatggctatgaagagtatgtttcgcccgccatgaaggcggcaatcatgcaataaccgatttatgaaaagcgcagttttcctctacaacacccaatccggcaagtgcaagatcggccactgtaccgcgagcatctgcaccgtattccgggcttacggctacgagattaccccgcagccgatcgacttcgaagccaatcccttcgacggcaacgagcagatcagcctgatggtcgtggccggcggcgacggcacggtcaactatgtggtcaactccatgaaaagcaaggggctagatatccccttgggggtaatccccgcaggtacggccaacgatttcgccggggcgctcggcatgtcgcacaaaccgctcgaagcagcaaggcagattgcctcgggcgccatcgaccgggtggattgcggctgtgtgaacggcctctacttcgtcaatattttcagcttcggcatctttaccaccacctcgcagcgtacgcccgacgaacgcaagcacaaaatcggcaagctggcctatatcatcgaaggggtcaaggagttccgggcgatgcacgccgtgccgctccaggtcgtggccgacggcgaggcgttcgatttcaattcgctcatggtgctggttttcaacggcgaaaccgccgggggattccgccttgcgcgccggtcgtcgatcaaggacggcctgttcgactgcctgatgctcgaaaagaagaatttcctgcgttcgacgctggccatggggcgttacctgctgggcggaaaccccaagatcgtccgccacctgcgggttcgggcgctggacatcgtctcgacactcaacgaacctacggacgtcgacggccagaagggtgccgaattcccgctgcatatcgagtgtatcgccggcggcctgcgcgtgatgtgcccccgcgaagaggggaaataaaggcggtgcggaatccggccgcggatattgcgttttctttgtttttcgcgtaaaatgttgcatttccgtatgaaaaatgttacatttgtccgaaataccacgacgatatggcggataatatcaaaacggcaagggcgataaaggagaacggaagggagaacttgcgtaaggtttcgatctcccgcatcaaaaaggagatgaacgatgtgttctacctctccgacgacctggtaatcacgacgctttctgcgcagaacaatacgacggccgagtacccggcttcgatcgacggtttttcggccatcatcatgatgacaggcgaggcgaccgtgtcgatcgacatgcagaattacagtgtcaaacccaatacgatcgtcttcttcaaccccgacagcatcatccgcacggtgaaatgctcggccaacgccgcagcctatttcctcgccttctccaagtcgttcgtcaacgaaatccagattgacctttcgacctcgctgccggtctacatgcgcttcgggaaagcccccgtgctggaagttgcgccgcaggacgtggacgagatacgccagttgttccaactgatcaagaccatgctgcgcagcgacaaggagcgttaccgccacgagatcatccgcacgcttttcaccacggcgttctacatcatcaccgagatcaaccagcgcgagcagcccggcgaaatcaaacaggggcgctgcgaagtcctcttcgacgaattcatgtccctgttgcaacagtacaacaagcgggaacgcaacgtaagtttttatgccaaacagctgaatatcacgccgaaatacctgtcgtcggtcgtcaaggaggtcagcggcaagaccgctgcgcgctggatcgacgagtcggtgatcctcgaggccaaagcgctgctgaaatactcgggaatgagtattcaggaaatcgcttaccacctcaatttctcgacccagtcgtttttcggcaaatacttcaagcagcataccggcacgagcccctcgcgctacaagcgcaaaggctgatgcggcctgccgccacaggataaatccctctcccggagagggatttttattgtgccttttcccgacggggaataaggccggatttattattgcatatcaatcgcataggacatatgttgccggggcaacggggctttttccgccccttaatttgtaaaccatagcgtaaaccggaaaaaagatgaaaattgcaaaagctaccattaccgcgctcctttacacctccaagacccttgccaacggcgaacaccccgtcatgatccgggtctgttacaacggcaaacgtaaatacaagagtacggggctctcctgccccgcaaaactctggaatacggcgaaacaggaagtacgcggacgccatcccctttcgatgaatatgaacgcccttatcgaatcggaactgatgtgcctgaaaaacaaggtgctggattacgaacggcagggcatggcctattcggtgcagagcctgctcgaggcttcggggcggaaaccgccgtcgcgcaaaacgctggacgacctgttcgaagaacgcatcgcctatttcagggactccatgcagaaacacaatacggcggccggctaccagacgctgcggcatattatcggacggtattcccagaaccggacggtcgagctgttcgacgtggacaaggcctggctgcaggatttcgaacagcacctccatacgcgctacgccgacacgagcataaaacgcttcttcagcgcattcaaggcgctgatgaattacgcctgccaaagcggccaactggccgtaagtccgttccacgggttccgcctcagccggaggctcgatgtcaggacagccaagcgggcgctggaaaccggggaactggaggcgatcgtacgttactacctcgacacctattattataagacgaaccgaaagcccgatgtaaaaacgatgcagcgacgctactggcgcagccgtgtgtatggggcggacggcaccgtcaggcaggccgcgatcgatgccgaacagttttcgctcgcgctgtttatctgctcctatatcttccaggggcttgccctggtcgacctcgccaggctgaagtggaaggatatggtctgcatcgaaattcctgacaaggagaaatacgaccgggatcgtacgacatacggcctgcgatatgccgaggtgcacaaggccacagtcacgttctacgaaatcaacctcgtccgtgccaagacgcaacacccgacacgggtgctggtcgaacggtcggtggcatggccctacatggtgccgttcttagggccgggaaaggcgcggggcaacgatttcgtctttccgatctacttcgacgaagaccctgtgcatcagttcgagcggatcacctatgcgaacaacgtgataaaccaaagcctgcaacgggttgccaaacgcatcggcctcacgcggaaagtcaccttctatgcggcacgccatacctatgcgtccaggctctaccatgccgacgttcccctgcccctgatcgctcagaacatgggacgcaaccccgcggagatcgagacctacctcaaggagttcgacaccgacaagattatcagcgccaacaaacgcatctggcaaatcccccggacagaaccgctcgaaacgaataccggcggattgtaaaccgtccagtcaaccggctacttcttattgccattaacagactgataaacaaggtcaaaataattatccgcactgttcctcacgggaacattgttagccggtgtcggttgtaaggactacgacgacgacatcaaggaaatcaacaacaaaatcgaaggcctcgagacgggcaagcttgcctcgcttgaggaacaactcaactccctaaaggttacaatcagtacgctggagcaggccaacaaggatcttcagcaaaaaatcaacgaacaggaaaagaccatttcttccgccacaggtgatatcgagcagcttgaaaaagaactcgaaaaaacagttaaagcccatgaaagcttgcaaaccaatattgataatctgaagaaatattgcgacggggctttcctcaagacagcagatgctgccaaaacctatgcgacaatcgccagtgttgcagatgccgtagctcttgcaaagaacctgaaagtctacaacaccgatgcagccatcaagaaggccatcgacgatgctgtagctgctgctgtaaatgcaaacggagcagctttccaggcagctttcgacacgcgtttcacatcggcactcgatgcagcgctttcgtccgaagctggtaaggaaggcaagatctaccaggctatcacggctgccatttcgcaatacgatggtaaaatgcaccagtgcctgaccgacgccttggcagaaaacggtgttataaccaatgctattgccgatgccattgccgatgcgaaaacagatttgacggcagagttgcaaaaatgggtatcgggacgtctgaccagtgtaacgctgattcccgatctgtatgaaaacggcattgagacgatcgaagtcaactcgttacgctacaagaaaatgaaggtcaatacctctacggaaacggccgctgttactcctgctaccgaaaagtattggtatatttccgaaaaagctacacccgttcgctaccacgtttcgccttcggtcgttaccaacagcgatatcgagactccttcgttcgtgttcgaacaggctgtttcgcgttccgccgtcggcagcacgctcctgtccgtcgtttccaacacatggtcgaccgaggccggcagtgcatggaacatcaagagcaacgaactgacagtcaacacacgtcgtgttgccggttatggtcttgtaaagcctgctcccgaaaataatatctatacggcagcattgaaggtgcctatcgcggagaaatggctggaagacgatgccgacgatacgttcatttattccgactatacgaaactgagcgaatatatctatgatgttaagatcgcagccctgcgcgatgacggggaaggaattgccaagtacagcgatacggacagcaaacattatcatttctacgagacgtataagaaggcaacagacttggtggcatcgaagccggctgcgacttgcgattacgacgaaacgatcgacctgttgaccctggttaccggttgtgcaaccaatgcagagggagctaaggcccgtgaaatcaataaggcagctcttgctgttgcgggtttggaattccgtttcgcagtgccgacagtcccgttcaaacgcggcgaaaacgaagccgacaaccagaagtacatcaaactgaacggctcggttgcaacccccgttaccccggaaggaaccgagaataaccaggcagccatcggtaaaacccccgttgtacgcgtcgaattgtgggatgcaaaacgcaatgagatcgtagacgtaaaatggctccagctcaaatggacacaaaagaccttcagcttcccgatcgacaagatctatacgaaactgggttgcagctatacctataagttcctttgggatgatatgaacaagcatatcctcgagaagatgggcgagagcggcatgtcgcaggccgatttcgtgaatacttataaagtcgcaggtatcagcacgaccgacaaatggacggagcgcaacaataataccggtttaggcaaggtcgttacggacaagacctccgacgattacaagaacggcaattacgaaatgtggtatggactcgatgccaatgccgcagagtcgacacccgcgttcgaatggcacctgacggccgaccagatcggtaagattatcgacctggacgggaagctgctcagcaagtacaaggacggtaaggatatgttcgttacgatcaatctggtacgcaaggacggcaacgtagacggcggtctgacgatcaccttcggtgtaaacttcaccgtcgagctgaaggctacggttacgaagaataccgcatggtggcactccgactacgcaggcaacgcgaacaagagtgtcaaggtcacgccgatccacattaacacggccaacccggaataccgcaacggaactgtcgataagttggttaactatgagttcgacctgacaagcgcatttaccgacaagaagccgctcgccaatatgaacaactgcgccgtatgggatattcagttctccaaaacgcagccagttacggacttcaaggttaactttaaccctgcaaccgccgaaccccaggtagagcacaacaacgacgattacggctatgtgctgcaatcgaagaccctcagcggtaatgcttcgagaatccagttcaacggctctcagacgcagaatgcatggttcggtatagacaacggcaagtcggtcgcatccgagatatccgtattcgtgggtgaaaatacagccggctatgcactgctcggccagcgtgcgaacgcgaagatttggggctcaatcaacccgaagaacatctatctggtcgaaacgttcgaactttcctacgttgccccgctcaagttcgtgaacgacctgggtgtcgtagagcttccctatgcagctgaaggacagactatcgattgcgcagaggctatttcgatccgagacttccagaactacctcgtagctgcaaaagccccggtagcagcgcaaggtgaggatgaatatgctcccgaacgctacaagtactacgatgtcaagaccgctcaatggaactttgccgaagcagttgtcaatcaggctgtcgacgcgcagggcaatatttcggctgtcagcatcgagggtatcactgccgacaactacgcaaccgaggttgccaagagaaagctttatagcgccaactcgttcttcaagatgccttcgggtcagaactgctttgagacgaatgcccaggatgctacgaaactcgatttccacagcctgcttggtaacgacctcggcaaagaggtatcggtactgattcccgtatcggttcagcacaagtacggcgtcgccaagaccctcgttcaggtcaaggtcaaaccggttgttcttgactaagacatctttcccgcggaatccggcgctgcctcacagcagcgccgggaacccggaaacataccccaaggcaggagtcgcacctccccaaagttttttggtaacaacaactcccacttttcaagtaaaactcctgcctgcggcagaccgaagaggcgcggtctgccgctttttttgtgcccggaagttccgcggaactcttccgatcttcctctcgcgggcatcacgcgcggcaggcggcccgcaatgaccaaccctgtcctaatatccgctcgcgcccgacccggcagtgtttctacaatcacgcaacggcccaatacgaatgcacaccactcaaccgacaaacacgccgtacgtatatcccgacatacattccgccccgaataacgccggacagccgactccggataccgacagcacggaagcggcgcccgcagcggaaaatttgattttgagccggcgttgtattatctttgcatcaggacaccaaaaccatccgagacaatgaaacgatacatagcgacactcctgctcctcgccatctgcgcctctacacaggcccgcgaggtattccccctgaacgagggatggcgtttcttcttcaagtcggagaacagcagcgacaacgcccgacatgttacgctgccccacacctggaatacagatacgggaggcaccggatatttcctcgaaacaacggccaactaccagaacgacatgtatatcccggccgaatgggcgaccaaacggttattcgtgaaattctacggcgtgcaaagcgtggccgacgtcttcgtcaacggctactatgtcggcgggcacaagggcggaggtacggcttttgcgctcgaaatcaccgacaagatacggttcggttccgacaatgcgctgctggtcgtcgtcagcaacaattactgcgacgacgtgcttcccacctcgacggacatgaatctctacggaggcatttaccgtgaagcggagctgatccttacggaaaaaacagccgtatcacccctctacttaggctcggacggaatactggtacatcagaactcggtcggcgacgagcgggtcgaaggcgaagcggagatccatctggttaccggcggggagaacagttgcgtcctgacgctcgacatcacagcgcccgacggcagccgcgtattttccaaacgacagaaaacgcgcatcgacgggaaacccgtcacgattcccttctcggtcgacgccccgcagttgtggagtcccgccaacccggccctctaccgggtatcggtaagcatcggcgacgcgaccgtcaccgacagcgtcgccgtgcgcacgggcttccgcagcatcgtagccaccccggcgggcggctttgcggtcaacggcagccgcatcccgatacacggcgtaacgctctaccacgacaacgccatctcgggcggcgcactcatcgcgcccgactatgaggctgacctcggccagatccgcaccctcggggcgaacgccctgcgttcggccgtgatgccccatgcgcaatacctctacgaccgttgtgacgagctgggcatgctggtatgggtcgatgcgccgttccaccgctcctcgttcctgggcgacgtggcctactacgccaccccgcagttcgaacagaacggcctgcaacagttgcaggagatcattgcccaaaactacaaccacccctcggtggtgatgtggggtatcttttcgcggctttggacgcgcggcaacgacgtaacgccttacctgggcaagctcaacgcggcggcacacgccctcgacccttcgcgtcccacggtggcctgcagcgaccaggacggcaatatcaacttcatcaccgacctgatcgtctggcgacaggacgtaggctggcgcaaaggcacgacggacgacgtgaccgtatggcgcgaccagttgcagaaagggtggtcacacctccgctcgggaatctgttacgggggcagcggcttcatcggacacaaaagctatacggcacaggcggcaccccgcgcgaactggatgcccgaggagcgtcagactcacttccacgagcagtatgccaaaaacctccagaacgactcgcttttctgggggacatggatcaacaacatgttcgactacggttcggtacgccggccttacggggtgaacggcgccggtctcgtgaccatcgaccgccgcgagcgcaaggatgcgttctacctctataaggctctgtggaacaaggaggaaccgacactgcacatcacagacaagcggcggacgctgcgcgacggcgaacggcaggcattccatatctattcgtcggccggtgcccccacgctgctcgcaggggccgacacgctggccgtgacggaatacgccacgtgccagtaccgcacggattcggtgtcgctgcggggcacggtcgaaatcaaggccatcgccgggccgttgcgcgacagcgtgacgctcagagtcggcaacgtcttaaaaccgaaacggcttcagggccctcggcgaacagcaaatccgcaaccgacaaattaggctggaaaggcatacggtcggagaagacctgcacatagggctcggcaatgaacgccgggccctctttgcgccgtttgggacgcaggtcggtgtcgcccgcggcggcagcgacatacgcctgggagaactccggcatgggaacgcgcagcagggagcagagccgaccgagcagttcggcattgtaatcggccaggaatccgtattcccggcggtagaaaggttcgaaatattcagcgtaaaaatcgaaatagggcgaccctttgtaggaggcgaccaacgccccccagtgctggtgctgccagcgtttcgaatagtcgatccgcacgtcgcgtacgggctggcggggacggttggcatgacacacgtggacggtcagctccatcaccccgtccgtagcgaggatacgggcgcggttgcgctccgagcgcttcacgaaatgctcgcccaggtcgacgacgcacccgccgcacaacaagtgcgcgaagtactcgaccgagggcaggtatgcgagcggcaggatcgtcatggctccacccactcgccgtcggccttgatcagttccacgaggcggtcgagcgcctcttcctgcgggatgttgcgtgcgacgaccgtgcgccccttgtagagcgtgatgcggccgggtgcggcacccacgtacccgtagtcggcatcggccatctcgccagggccgttgacgatgcatcccatgacgccgatcttgaggttcgagaggtgcgacgtgcgcgacttgatgtcggcgagggtcttttcgatgtcgtaaagcgtgcggccgcaactcgggcaggcgatgtactcggtgtgcgagaaccgcacgcgcgccgcctgcaggatcatcagctcgatttcgcgcacctggtcttcggcaaatccgggcgcgtcgatccagatgccgtcggccagcccgtcgagcagcagcacccccaggtcggcggcagccttcacggccaatgtctccagcgaggtctcctcgtaacggcgtttcacgacgaccggttcgggggtatcgaggttcaggatcgcggcgcgcaactcggccgtgggattgcccgacacggcctcgattacgcggaagccgtcgagcggctcgctgtgcacgaccggcacctgtatattcgtacggcggcggtactcggtcggggagtaacgctcgggatgcagcacgggaaatatcccggggcgctccgcgaagtgccttaccagcagttccgccacgggaatttcgtgctccggggcctcggtcagcgatacgcggatcgtgtcgccgatgccgtcgcagagcagcgccccgatacctacggcgctcttgatacgcccctcgatgccgctgccggcctcggtgacgcccaagtggatcggatagtgcatatcctcggcatccatcgccgcgaccagcagccggtaagcggcgaccatgacgcgcgtgttgctcgacttcatcgacacgacgacctggtcgaatccgtgcgccttgcagacacgcaggaactccatggccgagacgaccatgccctgcggcgtatctccccactggtcgaagacacgtttggcgagcgacccgtggttgacgccgatgcgcagggcgacgccccgctcgcggcagcgggcgatcaactcctccagctccccgcgatccgtgcggtaattgcccgggttgatgcgcaccttgtcgacatattgcgcggcaatggcggccacctcgggcaggaagtggatgtcggccacgacggccgtatcgaagccctcgtcgcgcaggcggcggacgatgcgggcaaggttctcgccctcgcgccgcccctgtgccgtaaggcgcacgatctttcccccggcgcggtcgatccgttcgatctgcgccacgctggcttcggtatcgttggtgtcggtgttggtcatcgactgcacggcgaccgggtgcccgccgccgatcacgacccgcccgatgcgcacctcgcaactcgggcggcgactgtattccgaaagattcatctcttctgcgattgtgatgcaaagataaagataatccgcgattttgcgaattccgatttattccctatatttcgggtagcaaccacaatcccgctcccgccatgaaaaaacgcatcaaaaaacgcctgtccttcctgttgctgacactgctcgggttctctacggcctgcgaaaaacagaaaaacggagaaccaccgaccgccatgtacggaacgccgcacgtaaatatctgggtcggcggcaaggtaaccgacaaaaccggcaccccgatacccgggatcgaggtgcgtcaacaaaacagctcctataaggcacagaccggggacgacggttgctacgaacttcccggacaattattctccattgaaacgacggcggacatcctgtttaccgacaccgacggcccgtccaacggcggggagttcgcagcacaatccgttccggtcgaattcaccgaagccgaccgcgtctcggaagccgagggatggtgcgggggcagtttcgcccacaccggtgtcgacgtcacgctggaggaggacgcgcaggaatagcccggaatagcccgcggcaacacccggcaaaaggaataacgccctgtgcgcgatacggatttcctgttttttcgtatatttgtcgtgtggactacctggacaacgacataaaattcgtaggcggcgtcggcgaagcccgcgcccggcttctggacaaggagctgggcatccgtacgctgggcgacatgctgcgtcactacccgttccgctatatcgaccgcacgaaagtctaccgcatcgccgagatcaccgacgatgcgcccaccctgctccagttccgtgcccgcgtgacgggcgtagcctatgccggcacgggccgcaaacgccgcttcacggcctatgtctccgaccccacggggtcggccgaactggtctggttccaaggtatcaaatggatcgaaaaacgggtcgaagtgggacgcgaatacctcattttcggacggccgtcgttctaccgcggcgaattgtcgatggcgcaccccgagctggaaaccatggagcaggcgctctcgcgcaaggccgaaagcggcatgcagggcatctatccctcgaccgagaaactttcgaacgtactcggcgccaagggcatgtaccagatcatctgcaacacatgggcgctggccaaagaccatatccccgactacatgcccgacgaggtgcgaacccgctacgggctgataccgctgcgtgacgcctactacaacatccattttccgcagtcgcccgaactgctgcggcaggcacagtacaggctgaaattcgacgaactgctgggcatccagctcaacgtccagtcgcgccgtacggaacgtctggccaaaaacaacggcttcctgttcatgaaggtcggaggcgtattcaacaccttctacaacgaaaagctaccgttcccgctcaccggggcgcagaaacgggtcatcagggagatccggcaggacaccgtcacgggctaccagatgaaccgcctgttgcagggcgacgtcggcagcggcaagaccctcgtggcgctgatgtcgatgctgctggccgtggacaacggctaccaggcctgcatgatggcgcccaccgagatcctcgcccgccagcatttcgccaccatcacgcgtatgctcgacggcatgggggtgaaggtcgccatcctcaccggcgcctcgaaggccagggagcgccggctggcgctcgaagggatcgcctcgggcgaggtgcacatcctgatcggcacgcacgccctgatcgaagaccgcgtgcagttcgccaacctggggttcgtggtgatcgacgagcagcaccgcttcggcgtggagcagcgcgcccggctctggacgaagaacgagcagccgccgcacatcctcgtgatgaccgccacgccgatcccccgcacgctggccatgaccctctacggcgacctcgacgtctcggtgatcgacgagcttccgccgggacgacggccgatcaagaccgtacattacaccgatgcggcgcggctgcgcctgttcggcttcatgaagcaggagatcgccaagggacggcaggtctatgtcgtatatccgctcatcaaggagtccgaggccatggattacaaagacctcaccgacggctacgaagccatatcgcgcgattttccgctgccggactacgtcaccacgatctgccacggcaagatgaaacccgccgacaaggaggagtcgatgcgccagttcaagtcgggcgaggccgatatcatggtcgccacgtcggtcatcgaagtaggcgtcgacgtgccgaacgccacggtcatggtcatcgaatcggccgagcggttcgggctctcgcagctgcaccagttgcgcgggcgcgtagggcggggcggcgaacaatcctactgcatcctgatgtcgggcgaaaagctctcgaaggagtcgcgggcacgcctcgacgccatgtgcgaaaccaacgacggattccgcctggcagagctcgacctcaaactgcggggtgcgggcgacatcaacggcacgctccagagcggcatggcgtttgatctgaagatcgccaaccccacgctcgatgtccaaatactcaccgtttcgcgcgaggcggcggccggcatcctctccgccgaccgcaccctctcccggccggagcaccgcggcctcagggagttaaggaggcgctattcggggcgcgaagagattgatttttcgatgatttcgtaatatttcatacccacgaccgtttatccattaaaaaccctttttccatgaaacgactgttattcacgatattgttattcaccgccgcactgcctgccgcagcccagctctaccacccgggcgagcagcttttctaccgcgtcagctacaaggccaagatgttccccaacaccgaagtgggagcggtcgaggtcaagacgagcgaggtgcagctcgacgaccgcaagttctacaaggtcgagggcatcggccgcacgctgcccacctaccgctggttcttcaacctcgaagatatctacacggtgtggatcagccccgagacgctgcgtccggtacgtttcgaaagcgacctcaaggagggcgactacacgttccagagctattacacttacgactgggacaacgaccaggtgcatacccggtggcggcggcgccaacggcctttcgaggagaaaaccatgcccctgactcccgagagcatggatgccatcgcgcttttcttcaccatgcgctcggccaatgccgaggatttcaaacccggtgagcccgcaaccctccagatggtattgcaggacacgatccggcacctgaattacaggtacataagccgcgaaacgaagaagatccgcaacatgggacgcttcaagaccctgaagttcgaatgccagctgggcacttccgaagggttctccttcaccgacggcacggtcttcacgctatggatctcggacgacgagaacaaaatcccgctttacatcgagtcgcccgtccgcgtaggcagcatcaatgcctatatttcgggctacaaggggcttaaatacccgatgacgagcctcataaaataaaaattttgttatctttgcctcaggataaccctgacccggcgaacaatcaggtaaattcgacactgaaaaactgtttttatggaagaaaataagcaagggtacgacccctcggaattcgaggacgacgattacatgacctcgcagcccgtcccggaaaaatccatccgcggctaccgcatcgtcatcatcatcctctcggtgatcctggtggcgctttcggtactttatttcagcatacaccgccagcagatggtcgacaaccagctgctgcaggccgaccgcgattcgatccagaacgacctgggacgcctgatgaccgactacgacaacctgcaggtgaccaacgacagcatctctgccaacctcaacgtggaacgcgaccgcgcagactcgctgatgacgcgcctgaaaaaggagcgttcatggaacctggccaagatcaaacagtacgaaaaagaggtgggtacgctgcgtacggtcatgaagagctacatccgccagatcgactcgctcaatacgctcaacaaaaaactcatcaacgagaacgtaacctaccgcaaggagatctcgtcggcgaagctgcgcgccgaaatggccgaggagaaggctgccgagctggacaacaaggtacgtgtcggcgccgtgatccgcgcccgcgacatccgtctctcggcgctcaacgccaacagcaaacccgtgtcgaggatcaagaatgccgcgcgccttcgcgtggatttcgtactgacggccaacgagctggcgacaccgggcgcaaagaccgtctacgtccgtatcacctcgcccgacggctatgtactgacgaccgaggccatgccgactttcgatttcgagggtgaacgcctgagttattcagccatgcgcgaagtggactaccagaaccaggatctcgaagtgggtatctactataacagcacaggctttgccgctggtgcctacaccgtacaactgttctgcgacggccgcctgatcggaacctcgcaaatcgcaatgcgataaaacaggaacaccccgcacccaaggcgggcggagaacccaagccccggagttaacgctccggggctttcgttttgcaggcggttccggcccccggcaacgacacagcacaactatagtataaaactataataatgtaaatattatcaatttgatttatataaagatttcccctatttttgtatcagcaaagaggaagaaaactaaagcagcaaaaaatattcacataaataaaaaagtatagctatgacatcaatcatcaattcaacggtacccgaattcaaggttcaggcctaccacaacggcaaattcgtaacggtcacgaacgaagacctcaaaggcaaatgggcgatcttctttttctacccggccgacttcacgttcgtgtgccccaccgagctggtggacatggccgacaagtacgaccggttcaaggccatgggcgtggagatctactcggtaagcaccgacacccacttcgtacacaaagcctggcacgacacttcggaaagcatccgcaagatcaactacccgatgctcgcagaccctacgggtgtactttcgcgcggcttcggcgtcatgatcgaggaagaaggcgtagcctaccgcggcacgttcgtcgtcaaccccgaggggaaggtcaagctggtggaaatccaggacaacagcatcggccgcaatgccgaggagttgctgcgcaaagtcgccgcggcacagttcgtcgaggcgcacccgggcgaagtatgccccgccaaatggcagcagggcgccgagacgctcaaaccgagtatcgacctggtaggtaaaatctaagggccatgctggatcatgcactcagggagcagttgctccgcttgttcgaggggctggaagcctcctacgtgttcgacgtcacggccgaccccggccatgcgtcgcgcggagagctgctcgagctgctcgaagagacggccgcctgttccgcgaagatcggctgtcggatcaccgacggacagggactggagttccggcttctgcgcaacgagaaggacaccggcatccacttccgggcggtgcccaacggccatgaattcagctcgctgatactggccgtgctgaacgccgacggcaagggcaaaaacctgcccgacgaagcgacgcgccgacggatcggggcgctcggcgggcagatcgcgctgacgacctacatgtcgctcacctgcaccaattgccccgatgtggtacaggcgctcaacctgctggcgctctccaatccccggatcacccatacggccgtggacggagccctgttccccgaggaggttgcacggctgaatatccaggccgtaccggcggtcttccacggcgaagagctgatctacgtcggccgcggctcgctggccgaactgctggacaaactcgaggaacgtttcggcacctcggatacaggcatcacgcccgtcgtgcgcgaatacgacctgctggtcgccgggggcggccccgccggggcttcggccgcgatctatgcagcccgcaaggggctccgcgtggcggtcgtggcagaaaaggtcggcggacaggtcaatgaaacggtaggcatcgaaaacctgatctcggtgccgcgcacgaccggagcagagctcgcgggcgacctgcgcagacacatggaggcctacgggatcgacatctgcgacaaccgccgcatcgagcgtttcgacatggacggcggcatccgggagctgcatgccaaaggcggggaggttttccgcgccccggcactggtcgtcgccacgggagcttcgtggcgcaggctcggggtgccgggcgaagcggagtatatcggccgcggcgtagccttctgcccccactgcgacgggccgttctacgcaggcagacacgtggccgtgatcggcggcggcaattcgggggtcgaggccgcaatcgacctggcgggcacctgcgcttcggtgacggttctcgaattcatggagaccttcaaggccgaccaggtattgcaggagaagctgcgcacgctccccaatgtagaggtacatacgaacgtgcagacgctcgaggtcgaaggcgacggcagccgcatgacggccctgcgcacgaaagaccgctcgacgggagcggaaaaacggctgccgctcgacggcgtattcgtccagatcggcctctcggccaacagcaagctgttcgccggcatcctcgacaccaaccgcgcgggagaaatcctcaccgacaaggagtgccgcacgtcggtacccggcgtatatgcagcgggcgatgtgacggacatacgttacaaacagatcgtgatcgcaatgggcgaaggggccaaggcggccctgtcggcctcggaagaccggatcaagggaatcatatgatatgcaaactattaaaataaaaacgattatgaaaacactggattatttgcacctggacgagcagaaagtacagggcgtagtatcggcgctgcattcgctgctggccgactttcaagtattttacaccaatctgcggggtttccactgggatatcgaagggcacgggttcttcgtcctgcacggcaagttcgaagacctgtacgacgatactgccgaaaaggccgatcagatcgcggaacgcatcctgatgttgggcggcaagcccgaaaacaggttcagcgaatacctcagggtcgccaaggtcaaggagatttccggcgtaacacgcggcgatgaggccatcgggcatatcctcaccacgtacagctatcttatcggcgaggagcgcaagttgctcgcactggcctcggaggccagcgacgagactaccatggcgctgatgagcgactacctgaaggagcaggagaagatggtctggatgctgaccgcctacaacaaatagcccttcacgggaagaccgggcagccggtatgtaacggcaatgccggcggagtttgtgctccgccggcattcttttcatccggacaaatccgaaaacggcatcggcaagacaagacaatcccggctcatcctctgccaggcaaaccgaagcgacgcccgtcgcccggccttccgccggattatttatgctcctcctgccagatcagggccgaagcgccgagaatcgcggcattcttaccctggataccgctcggaagcagcttcaccttgttcttgaatgcaaagagcatattctcctccatgtaccactgcgtaggctcgaagatcagcttgcccgccttcgacaggccgccgaagaggaaaatcgcctcgggcgacgtgacggtcaccacgtcggccaacgcacgaccgagcatctcgcccgtaaaacggaaggcttcgagtgcgatgggatcgccctgctcggcagcggcggagatcatcgaagcgtcgaaatcgccgaaagcgatgtcgcgcagcttgctgggagccgacattttggccatcagttcgaatgccgtacgcttgatacccgtagccgaaacataggtctccaggcagcccttccgcccgcaaccgcactcgcggccgtcgcgctcgacgatgacatggccgaactctccggcaaagccatcatggccgtaaatcatctcgccgttggcgacgaaacccgagccgaggcccgtaccgagcgtaatcatgatgaaatcgcgcatgcccttggcattgccatagatcatctcgccgatcgtcgcggcattggcgtcgttcgtcacgagcaccttcacacccccgaagcagttccggatgtcgtccgccagcgggaaaacgcggcggctttcatcgggattggggtctccctcgcggaatttccagaggttcgcggggttttcgaccgtacctttatgataattggcattgggggcaccgataccgatacccgtcagttcgtactcgaacgaaaggctgtcggccagtgcgtgcatcgcctggcagaggtcttcgacataggccggataatcgtctacactggggtatttcttggtcgaaatgaccgattcggcatacaggtcgccgttttcgtcgacgaggccgaacgcagtattgataccgccgatgtccacgccgatagcgagttttttcatatcgtgttctggttaaaggttagaatttatcaggtcaaagttaatccaaaattcggctactccaaacttttttcctacttttgggacagattccgatccaaaagtattgtcagactatgcaaacgaacgagcaactgctctccgccatcgaaaattacttggcccaaaccgagttcccggccgaacccgagctactttacgccccgatcggctattcgctcgcgggcggcggcaagcgcctgcgccccatgctgctgatgctctccaacggcatcttcaccgacaagatacaacatgccctgccggccgccgcggccgtcgaggtgttccataatttcacgctgctgcacgacgacatcatggacaatgcagccgtgcggcgcggcaaaccctcagtctacgccaagtgggggcagaacgtggcgatcctctcgggcgacgccatgctgatctgcgcctaccggttgctgggcgaagtgccggcgcaactgctgccgcagatactctcgacgttcaacaccatggcgctcgaagtgtgcgaagggcagcagtacgacatggatttcgaacgcaagccgaaggtttcggtcgtggaatacatgcacatgatcgagctgaagacctcggttttgctagccggggccaccacgatcggcgccctgctgggcggcgcttccgaagaggactgccgcaagctgcgccgcttcgccatcgaactgggactggcattccagttgcaggacgacctgctggacagctacggcgacgaaaggctgggcaaggccatcggcggcgacatcctcgaaggcaaacagacctacctgatgatcacggccataagccgcgccgacgaacctacgcgcgaagtgctccgctcgacgcaccgctcacagatgcccgacgccgagaaaatcgccacgataaaagccgtctacgaccgtctcgacataccacgcctcaccgaacagcagatttcgctgcgcttcgaaagggcgctgggcatcctcgacaccctttcggtcgaaaaatcccgcacggaacggatgcgcgaatacgccctgagcctgatgggacgcaaaaactgattccggaaacacccctcacaggaacatcccccgtaaacgacactatgcaacgctccgagatagaaatcatggcccccgtagggtcttacgaagcactggccgcagccatacaggccggggcggactcggtatatttcggcgtcgggaagctcaacatgcgctcggcgtcggctgcgaatttcacgctcgacgacctggcgaagatcgtcgccacggcacacgccgcaggggtcaaggcctacctcacggtcaacaccatcgtctacgaggacgagatgcaaaccgtccacgaggtaatcgaccgcgccaaggccgaaggcatcgacgccatcatcgccaccgatttcgcggcgatactctatgcccggcgcatcggggtcgaagtgcatatttcgacccagagcaacatttcgaattccgaaaccgtgaagttcttctcgcagtgggccgacacggtggtgctggcacgcgaactgacgctcgaacaggtggcgcaaatacaccgccagatcgtcgagaacgacatccggggcccgcgcggcgagctggtcgaaatcgaaatgttcgcccacggcgcattatgcatgtcgatttcgggtaaatgctacctctcgctctacgaaaccaactgctcggccaaccgcggcgcctgccgccagctgtgccgccgcaaatacaccgtcacggacaccgagaccggtgcggcgctggacatcgacgggcgctacgtcctctcgcccaaagacctctgcacggtcgatttcctcgaccggttcatcggctcgggtgtgcgggtgctgaagatcgaagggcgtgcacgcggcgcggaatacgtcaagcgcgtggtggaatgctacgacgaagcgctgcgcgcgatcgaagccggcacctacacccccgccctggccgccgggctgaaggagcggctcgccacggtcttcaaccgcggattctgggaaggctactacgccgggcgccccgtggccgaacacagccaacattacggctcggccgccacgcggcgcaaggtctatgtaggcaaggtaacgaacttctacaaaagaatatcggtggccgaggtactggtcgaagccgcaccgctgtccgtgggcgaggatattttcttcatgggtgccactaccggcatcgccgaacagacgctcgccgagctgcacgacaccgacggcaccccggcgcaatccgtggcacagggcaccctctgcgccgtgcacaccgacaccccgatccaccgcggcgaccagctctacaaattcgtcgacgcggaatagacccggctgtcaggacaatattcattacaagaaacgcctccgggcgtttttttattacgggttctctgcggtcaggcaggaaaaagttgcttatcataaaaattttatcgaaaaacaataaattttatttgtttttcaaaatttctttcgtaagtttgcagtgtcaaaaacaaaaagacacccactatggaaatcgaaaaagtcatccgcatcctggccattttcatcgccgtggcagcctttgcaatcaaagtagccacgcacctgatgtttcccggggcgtcgcacaccggcgacatcccgaccctgatcctgttgaccctctcggtctgcggcatctggcgggacgccttgcgcacgaaaaagcagaacgaaaatccaaacgaataaaccccatgaaaaaactcctcatgttcgccgccacggcagccatactggccgcctgtacacccaagacagcccccgagctgcctttggaaaccttcttccgcaatacggaaaaaaccgggtaccaaatatcgcccgacggaaaatatttctcctacatggcgccttacgaaagccgccgcaacatcttcgtgcaacctgtcgacggcaaggacgccgtgcgcatcacctcggaaaccgaacgcgacctggccggatacttctgggccaacgaccaccgcatcctctatctgaaagacaccggcggcgacgagaatttccaactctacggcgttgacatcgacggcagcaacccgaaggcctatacggccatcccgggcgtgcggacacagatcatcgacccgctcgaggagatcgactcgctgatgatcatcggcaccaaccagcgcaacccgatgatcttcgacccctaccgcctgaacctcaacacgggcgagatgacgatgctgtgcgagaatcccggcgacatccagagctggctgaccgaccacgacggcaagctgcgcgtggcctacgccatcgtcgacggcgtgaacacgcagatccgctaccgcgaaaccgaagccgagcctttccgtcccgtactgacgaccaacttcaaggagggcgtgtcgttcgccaccttcaccccggacaacaagctggtttacgccatcaccaacctcgggcgcgacaaatcggcactcgtgctgatggatcccgcgacctgcgaggagctggaacaactctacaccaacgataaatacgacctcggcggcctgtggtacagcgacgcgcagaagaaactgctgggcgtgtcgtacgaagggcacaagggcaagacccgccacttcttcgacaaggctaccgaagagatgctcggccggatggagaagcacctgcggggctatgaaatcggtatcggcggttcgaacaaagccgaggacaaatacatcgtctatgcgggcggcgaccgcacgatgggcgcctactacttctacgacgtgaaaagcgacacgatgaccaagctggccgacctcgcaccgtggatcgacgaacaacagatggccgagatgaccccggtcacctatacctcgcgcgacggcctcgaaatcgagggatacctcacgctgcccgtcggcaagacgcttcacaacgccaagaacctgcccgtagtggtcaatccccatggcggcccgtgggcccgcgactcgtggggattcaaccccgaggtgcagttcctggccaaccgcggctacgccgtattgcagatgaacttccgcggttcgaccggcttcgggcgcaaattcaccgaaatcgcctacggcaaatggggccagaccatgcaggacgacattacggacggcgtgaactggctgatcgaaaagggcatcgccgatccttcgaagatcgccatctacggcggcagctacggcggttacgccacgttgcagggtatcgtcaaggatcccgacctctatgtctgcgccgtggactacgtgggcgtatcgaacctcttctcgttcctgcaaaccatccctccctactggaaaccgatgctcgacatgatgtacgagatggtcggcaatcccgaaaaggacgcccaaatgctgcgcgaaaactccccggcactcaacgccgaacggatcaaaaccccgctgctggtggtacagggcgccaacgacccccgtgtgaacatcaacgagagcaaccagatggtcgacgccctgcgcaaacgcggcgtgcatgtcgactacatggtcaaggacaacgagggacatggcttccacaacgaggagaaccgcttcgatttctaccgcgcgatggagaaattcctcggcaaatacctcaagggcatcgaacccgagggcgaaatcgtccccgaaagcagccgccggtagtcccaatacagacaatccctaaaacgaacacagcctcattttt

SEQ ID NO: 320 - DNA, 54094 bp, Alistipes onderdonkii
  source 1..54094: mol_type = genomic DNA
gggggggggaattacaggtttcctatgtgggttataagacccggacaatagccatcacccccaatgtccgtataaagctcgaacccgatgcccaggccgtggaagcagtcgtggtcacgggtatgaccaagacggacaagcgcctcttcaccggggcatctgaccagctcgtcgccgatgacgtgaaactttccggcatggccgacatcagccgcggcctcgaaggccgttcggccggcgtctccgtccagaatgtttccggtacattcggtaccgcacccaagatccgcgtccgcggtgccacgtcgatcttcggaagctcgaaaccgctgtgggtcgtcgacggcatcattatggaagacgtggtggacatcgacgccgatgcgctctcgtcgggcgacgccacgacactgatctcttcggccatcgcaggcctgaatgccgaggatatcgaaagtttcaacatcctcaaagacggttccgccacctcgatctacggcgcacgcgccatggcgggcgtcatcgtcatcaccaccaagaaaggccgtgcaggcgtcagccgcatcaactacaccggtgagttcacctaccgcatgatcccctcgtacaacgaattcaacatcatgaattcgcaggatcagatggccgtttacgaagagatgcgcaaaaagggctggctgaacctcgccgaaacggccaaccgttccgagagcggcgtttacggcaggatgtacaacctgatctccgcctccctgatggagaatacgcccgaagcgatcacaggctatctgcgtgcggccgaataccgcaatacggactggttccaggcgctgttcaacaacaatatcatgcacagccactcggtgagcctcacttccggaaccgagaaatcgtcctactacgcttcgctgagcgccctgtccgacccgggatggacgaagaccagcaaggtttcgcgctacacggccaacctcaacgcgacctataacattctggacaacctcaccctcaacctgatctcgaatgcgtcctaccgtaaacagaaagcgccgggaacgctttccagcactacggacgccgtaacgggcaccgtgaagcgcgactttgacatcaacccctattcgtacgccatgaacacctcgcgtacgctggacaaagacgcctattacacgcgcaactacgcccccttcaacatcctccacgaactggatgccaactacatggatctggacgtggtggacacgaaattccaggccgaactgaagtgggagcccgtcaagggactcgagctggctgcgctggccgccgtgaaatacaacgcgacggtgcaggaacaccacattaccgacgaatcgaaccaggcgacggcctaccgcaccgactccccgacgaccgtgcgcaacaacaacccgttcctctataaggatcccgacaacccctatgccgtaaaagaggtcgtattgccggtgggcggcatctacgaacgtgacgaccgcaagatgtactcgtacgacttccgtcttacggcgacttacaacacgacgatcaagaacgcccacatcatcaacctgttcgcgggtatggaggtcaactcggccgaccgccacaacacctggttccgcggctggggcctgcaatacgacatgggcatgacgccgttctacgactaccggatcttcaagaagggacaggaagaagggtctaaatactacacgctgggcgacacctactaccgcaacaacgcctactacttcaacggcacctattcctacaaagggcgctataccgtgaacggcacgttccgctacgaaggcaccaacaagctcggcaagtcgcgcaagtcgcgctggctgcccacctggaatatttcgggcgcatggaacctgcacgaagagtcctggttccagaaggcacagcccgcgctgtcgcacctgtcgctgaaggcgtcctattcgctcactgccgaccgcggcccgtcgacggtgaccaactcgcgcgtggtgatcaacgcctacaccccctggaggccgtcggccggcgacggcgaatcgggattgaagatcgaagacctcgagaactcgtcgctcacctacgagaagaaacacgagctcaacatcggggccgacatgggctttgccaacaaccgcatcaacctggtagtcgactggtacaaacgtaacaacttcgacctgatcggcgacgtgacaacgcagggcatcggcggtatcatcaagaagaagggcaacgtcgccgagatgaaatcgaacggcatcgaaatcagcctttcgaccaagaacatcaaaaccaagaatttcagctggacgaccgatttcatctattcgcacatccacaacgaggtgagcaaactcgagacctcggtgcgcgtgatggatctggtggcgggcagcgggttcacgctggaaggctaccccgtacggtcgcttttctcgatccccttcatggggctgaacgagatcggtctcccgacattcctcgaccagaacggcgacatctcgacgaccggcatcaacttccaggagcgtgaaaacctctcttttctccagtactcgggttcggtcgacccgaccgacatgggatcgttcggcaatatatttcaatggaaaggaattaaactgaacgtcttcatcacctactcgttcggcaacgtggtgcgcctcaaccccgtattcaagtcttactattcggatctcacggctatgccgcgcgaattcaagaaccgctggatggtaacgggcgacgaaaagaaaacaaacatcccgacgatcctttcccagcgcatgtaccacgacaacaacaacctgtcgcgcgcttacagcgcctacaactattcgacggctcgcatcgccaaaggcgacttcatccgcatgaaggagatatcgctgacctacgatttcccgaaaaagctgatctcgaagctgaagttccagagcctctccgtaaaatttcaggcgaccaacctcttcctgatctacgcggacaagaaactcaacggccaggatccggagttcttcaacaccggaggtgtcgcggcaccggttccccgccagttcacgctgaccatccgcatcggcttatagtccctaacacttcaaagagaacaacaagatgaaaaaaagcatattctatacgttcggcctcgcgctggctgccattgccttcgcgtcatgcgacgatttcctggacaagatgcccgacagccgcgccgaactggataccgaagaaaaggtcgtcaagatgctggtgtcggcctacccggacaatacttataacatgtgcgccgagttctcgtcggacaacgtcgacgactatggttcgataaagagttacaaccaacttcaggaagagctctacaactggcaggaagtaagttcggtcgaaaccaatgaaaaccccaacgcggtatggggcgatgcctatacggcgatcgccgcggccaaccaggcgctcgcggccatcgaggaactgggcggtgacaagacagccaagctccaggccgccaaaggcgaggcgctcatctgccgcgcatacgcccactgggtactggtcaacatgttctgcatgcattacaacaccaaccacccggacgacctcggagtaccctatatggaacacgccgaaaccgagctgaatccgaaatacagccggggaacggtagccggggtctacgaaaagatgatcgaggatatcgaaaccggcatcccgctcatcgacgacgcgatctactcggctcccaagtaccatttcaactacaaggccgcctgctgcttcgcatcgcgcgtcttcctgttccacgaggactgggacaacgccatcaaatacgcaagcatggcgctcgggtcagatcccaaatcgcagctccgcgacctcgattacctggccgcattcccgcgcaacccgttgaacgacatttcgaaagcgtacaactccacgtcgctgaaggccaactaccttatctcgacgggactttccaatgccggcgcgattttctgcaactacgggagccagaaccgttacacgcacggcaagtcgatcgccgcctacgagacgatcgagacatccgcgaccacgatgagccccttgggcagcaagtacggctggaagctccgcacatgggtatacgggtcagggcgctacctgcttccgcgggtgccgtacctcttcgaatactccgaccccgtgcaggccatcggcttcacccactcgctgttcgtggtggccagcggcgacgaagcgctgctcaaccgtgccgaggcctatatcatgaaaaaggactatccggccgccctggccgacatgaacatgtgggcgcagaaccagctcaccgcctcttactacaaagaactgaccgaagagtcgatcaacaaatgggcagatgccctgggctacgacatgacgcccaaggatcccgaaaaacccgaggacgacctgaagaacatgtatcgtacggccaagaaaaaactcaacccgggcttcgtgatcgaccccggcacgcaggagaacatgatccatgcgattctcttcatgcgtcgcatcgaattcatgcacctgggcatgcgctggttcgacacccgccgctacggaatcaccctttaccgccgcctgatcgaccaggacgaggatactctggtcaaggtgaccgacacgatgaccgacgaaggcggcaaccgcgacccgcgccgctgcctgcaactgccgcccgacgtcatcgccgccggactgacggccaacccccggtaaaaacgataaaaaagattttcgattatgaaaaagaacctcatatatttcctcgtattgcttctcttccccgcggtactcgcagcctgctcggaagacgacctgagttccacgagcgtgatccagccgccgcaagtcgtgcaaaacgatttcgaccgttggctcgacaggcattacctcgcgccctacaacatcgaattccaataccgctacacggacatcgagtcgagcatgggttactacctgacgcccgccgattacaaccagtcgatcgcgctggccaagctggtcatcgcactctgccttgagccctatgacgaagtgacgggcagccgggacttcatccgtgcttacttcccgaagatcatcttcctcaccggttcgccggcctacaaaagcaacggctcgatcatcctcggcacggcggaaggaggcaagaagatcacgctcttcaatgtggatgccctgcaaatagcctcgatcgacgccagcacgaactacttcaagacgatccaccacgagttcgggcacatcctcaaccagaccaagccctataccaccgacttcaaggagatcaccggaacgctctatgtgggcgattcttgctgggatacctacaagacggacgcctcggcactccaggtcgggctgatcagccgctatgcaggctccgaagatacggaagacttcgtcgaactgatctcgatctacgtcacccgcccgcaggaagcctgggacaaactgctcacgacggccggcgccgacggtgcggccatcatcaaccagaaattcgagatcgtccgcaactacctgcaaaacagctggaacatcaacatcgacgaactgcgcgagtcggtactgcgccgtgcggacgaagtccccgacatggatctggaatccctcgacgactaactaaaaaaaactgagccatgaaaaaattagcgataatacttctggggctgttccccctggtgctgagttcgtgcctgaaagaggaggaggattattttgacaaaagcgccagcgcccggatcgaagaggccgtcaagaacgccatctccgtgctcgaaggcgcggagaacggctgggccgtgaaatactaccccaaccccacacagaccttcggggggttcaaccttttcttcaaattcgacgacggcacggtgaccgtcagctcggagatcgaaagcgcgtcgacgaccgccaccagcctctattccgtagggcaggaagcgggtcccacgctggcgatcgacacgaaaaacgagctgatcaactatttcgcccacccgcgcaatccggacgggtacgggtcgaactacaaggggctggaaggcgactacctgtggactgtcctgagcgcaacacccgaaaaggtgatgctgcgaggtgtcaaatcgggaagcctctacaccctcacgccgctggaaaccagcgactgggcattcgaaatgcaggcatacaagaacgctgcctcggacatggagttcccctcttatgtctgcgtcgtcaagggcgactcgctggagtgtatcaccacctcggagggcaagttcctctaccggaacctcacgatcaggcaggaaaccgacaaaggcatcgaaagctacgccgcgccgttcatctacaccaagaccggcatcgagctgtacgaaccgctgacgatcaacggggtcactgcccagaagctcgatctgaaggaggagtactattttgccaacgaggacgattcgttcatcatttcgggccccaaacccgttacctcggacaatatcctcacatacggggcggtcgaaacgaccttcaatacggtcaaagtgactgtaaccccatccaattccgacacttactacgtggcggcgttcctgccttcggagatcgcaggttataccgacaagcaactgcggaacgcgatctgcgacctgcttgcggccggcgacctctactcgggtgagaaaacactcacgttcaactacctgtacgaccaggcggaatatatcctcgtcggtttcggtatcgacgcaacgaccatggcctcaacgaccaagatattccgccagagcgtgacgacgggcacactgccggatacgatggccgacgggtacaaggcatggctgggtacatggactgtcacatcgacctcgtccgagaaatcgaagaccgcgtacagcttcgacatcgaaatccgtccgaggacgatcgacggcacctatctcgtacggggatggggttatacggtcatcaaggacgactacgaagtcgatgcgaattacgtcagttcgaccaaaggcttccagttgttcaaacgcgaggtcggcacgctcggcgacggcggggcactgacgctgctcccgcgtatcctcaaccaccagacaaacgcctacgggctgctcaacacgagtgcgtacctgctctacgcgaaaccggacggggaaggcaagggcaacatcacgggccgtgagggttcgctctccggcggcggtacgttcacgatcgtgtccgccgacttctggaacgtcaagaacgggtcgaactactacttgcaggccatggatccctacacctaccaggatttcttcgtcgggccttacacgatggtacgcaaatccacggactacgggccgtcgggacgttcggtagccaacgcaatgggcatcgaagaacggcaggccgcaactgccgttaccatgccccacgacgtgaaggttcccttccgggccgaagagtaacccggggcaggctgcacggcgggacatcccgtaaagatgtctcccggcaggctccccgcaggaaaaaacgcgaaggggcggatctgagatccgccccttcgccatatccatcggcaaccctgtcaatcgaagaaattgtcgtcctcggcgatcccgggctccgtagggcgttcgtcggggtcgacctcctcgtcgcagtcgtagcgcggcatcatcgctgggcggatgaactgatcggcacggctcacgccgaggcgcccgtcgtcatagacccgtttcatgaagtcgcccacgatcggcagcgccatcacgctgccctcgccgcccgccacgaaatgcactgcctggtcttcgccaccgacccacgcgccggccaccagtttgggcgccacgcacatgaaccatgcgtcgcggttcttgttcgaagtgcccgtcttgccgccgatctccatgtcgttgagcccgaactgccatttcagccgcccagccgtacccgagttgaccacgtcctgcaacatcgtcagcatcgtataggccgtgcgctcgctcacggcatcctgcgactgggggatgaagttggcgatgacgttgccctgcctgtcctcgatgcgcgtcacgaagatgggatcggtatgcacgccctcgttggcgaaggtcgagaaggcgctcaccagctcgaagacgttcgactccgaggaaccgaggcagagagccggcacggggtcgataaagctgcgtatgcccatgttatggataaagtcggccacggcggcgggctgcttggcctgcttcatgatccacgccgagtagttgttgcggctgcgggcgagcccccagcgcagcgggtgcatcacgccgtcgtactcgaccttgcccgcttccttgggcgaccaggccgtaccgttggccgtctcgatcgtcacgggcaggttcggcaccatcgtgcagggcgtcagccccaggtggtcgatggcgaacgtatagacgaagggtttgatggtcgatccgatctgccgcttgccctgcttggccatgtcgtacttgaaatagcggaagttgggcccgccgacatacgccttgacataccccgtgcggggatcgagcgccacgaacgacgcgcgcatgatccgtttgtggtgcaggatcgaatcgcgcggggtcatcagcgtgtcgcgctcgccccggtacgtgaagaccttcatcgaacagggcttgtcgaacgccgccatgatctgcttcgcgctcgccccggcatcctccatctcgcggtagcgatccgaataacggatggcatgccgcatgatccgctccctctcctcgcgcgtcgcgtcgatgaagagggtcttcgtattgcggtattgcgcgtccatacggggctggatcacgctctgcatctgcttctgcacggcttgttcggcatatttctgcatcgtcgagttgaccgtcgtatagatcttcagcccgtcgcggtagatgttgtagggcgtaccgtcggccttgcggtttttgcggcaccagccgtagagcgggttttcctcgtactccttcacggcctggtcgtaatcccattcggtgtagaactggttgcgcttggggcgctcggcgttcatcacaaggcgcagcatctcgcggaaataggtcgccgtgccctcgttatgcgacacgggcttgtagttgagcacgatcggcagggcgctgatcgagtcgcgcaccttgcgtgtcagcgccccggcatcctccatgcgcgaaagcaccaggttccgccgcgcgagggcgttctcggggttgcgcacgggcgaatagcgcgtcggggcgttcaccacccccaccagcacggccgcctcctgcacgttcagttcgtgcggctccttgttgaagaaggtctgcgccgccgacttgatgccataggcgttcgaaccgtattcgaccgtattgaggtacatggcggcgatctcctccttcgtatagttgtattcgagcttcagcgccgtgatccactccttgagtttcgacacgacgagcttcgacgaacggacgatacgcccccggttgcgcaccgtgtcgcgcgggaaaaggttcttggccaactgctgcgtaatggtcgaaccgccgccctgcgacgtattctgcaacagtacggttttcaccgccacacgtgccagcgaagggatgtcgatccccgaatgggtgcggaaacgggcgtcttcggttgcgatcagcgcagcgacgatcggcggcacgtcatgcccgtcgagccggatgtggaatgccgaatcggccggaaaaaggtcttcgtactgcacataagaacggttctgcacgaagaaggaaccgatcaccttgccgtcctcggagtagatttcggtggccaggttgctgcgcgggttctccagctcctcgaacgaaggcatgcgcccgaacagccccagggccgtcagcagcaacatgaccgccagcaacgcaaagggtgcgaagaccaccccccatatccattttatcgttttcgggctgatgcccgcctttttcctttgtgccataggcctgaaatttgcgctaaagatacaaaatttattacaatcagaacggcagccccacggccgcggcccaccagacgcccccggtgctgggatggtagaccgacagcttgaaggtcgacgtcgccgacgcaggctggcggaaagcattgatgtcgaacacgatgtcgccgccgaccgaccatatccgccgccaatccatgcctttgcccgcagggcggcggaactgcgcgtaatcgccgcctgcgttgagccggatacgcttgaaatagagcaccgacccgatgccgccctcgggataccacaccggcagctggtagtcgagcgacacggccgtataattgttcgacacgatgtccgccgacgagaagccgcgcgggatgagccgcgtcgacttatagctcaggggcgcatagcccgccgggaacttgtagccgccgaccgaagtctggtaggtggccgccactttcagcgagttgtgggcggccaggcccggtaggtaagcctgcccgaagaacgagatcaggtcgctgaaatgcacgttcgcggggttgaacgtatacaacgtgctgagcgtatagccccaccggggtgcaaagtcgcggtgcgccatgcgcacctggtcggaatagccgagcccgaacgagagtttgtgcagcccttcgcggaaaccgatgcgctggatattggtgatctgcccgccgtcccattcgatcttgtcgaggttggcgaccatgccgttcgaatagttccagccggcagacaccgacagctggcgggtgtgatacccccgctggaaatagagcggcagcgtcgcagagagccctatggagtagtatttgtcgggactgggacgcttctggtaaatggggtcgcctgtcttcggatcgtacgacaccagcgaatagaagagctggttgccgccgtacgacgcatccaagtcgaggtgcacgcccagcccgaagcaacgtaccccgaggttgaagagcgaaccctcgttgcggttccagccgtaggaggcataagcctcggtattcgacagcaggttctgcgacaggagcgtaacgcccagattgaggttgatattatgctcgtccacggcatcgaagggattgaacgccatgggcatccagctgtgtacgttcaccaggttgggcaccttgcggtagcgcctggcgcggaacgtgccgcactggcgcagcgaatcggccccggtgaaccgcaccgtgtcgaggttcacgacgtcccagcgcttgcgttcggggttcacgacgttgagcggcagcttcgagggggcgaccgggatcagcgtactgtccgcgacccgctgtgcggcgacgcggtaccccctgcggtcatacgtggtcagcaacaccccttcgccgtccgcggcgtcgtgccacggcgccggggaaaacgaaccgaaggccgacgtggtgatgcggtattcgcggcgggccataaggtcgtagcagtgggcttcgtccctgcccgatgagatcgagccgtaatagagcttcccgccgcccgccctgaggttgctcagcgtgatataagccccttgggtgacgggggacactccttcgtcgtcgatgcgtccgagccacatgcccgcgtcgtcggtcacgatgacatagtaggccagcgtcacgtcgtcccacgccagcccgtgtatctcggtatggcggggcgtgccgaaacgccgctcgggctgcccgtcgcgctgcactacgaccgtataagtcccgtcgggattatactcgacccaggccagttccccgggtgccggcgtcggatagagcgcattgcgccgcccggcgaaggtacgtgccaccccccgctccagatccatgtagcaaagctgggagttgacccgctgctcgaagagcttcgaacggcggtactccgtccaccatacgcgcccgccgtacattgcagggcgggtcgagaccagccccgtataacacaccggctcctcggcaccggtacgggtgtcgagccgtacgaaacgcgacggacggtcgtaatcggtcttgagcaccagcaccgtcgtgtcgctgagcggcagcggccactggtaggtcgtgtagtttccttcgggcatcgccacgagcggcgcggcgctgtccccggttcggggcagcgaatcccaatgacattccaacgcgtcgaaggtctcgcgaaaaagtttacggacattcgtgccgtaatatttttcaagcgcgatacgggtcgtggccagcatataggggttgcgcgaaccgaaccacgccaccctgtcccacacgttctcgtcgtaacgcgcataggcataagaacatatctggtatcccagttcgtaatggtcggggatatagtcgcggtaggatccgcagaaccacttgtcgatgttgcggcggtcgcggcgccccttgtaatcgcgccccacgcgtcccatggcacggtagcccatcgagaacgaaggctgcaacccgcggccgaacgacgacatggcggtctccgacatcacggcatcgccctccatcgcccatatcggcatgcacaacaggccgatagtcgagccctgctgcccgaggatatagctcagggcgcgtatcacgccgcggttcaggttgttatactgcaccgcatggcggtattcgtgcgccacgagctgcttgtaccacggcatggaatagccgtcgatggccggcgaagtgaggaactccacacgcttgggcaggtacatcaccagcccgttcgactggaaattctcggggtgcatgacgaaggggatgcgcatggggccgtggcggaacccgtacgagatgtcgggctgcacggtgcggatgtaaaacagcgtgcggcgcgccacgcccgacacggtatcgggatagatcatccgcacgtcgggcgtgcggatcgtgctccacttcagccccgtagggtcggaaccccacgtgtaatactgtgcccagactttcggcgcgacgcccaaggcacacaggaacagtgcggtatacagcagcctgcgcatctcaggagccggcttttttacaacggtagccgcccttggcgaggatctccacaacgcggtcgcggtggtcgccctggatgatgatctccccgtccttggccgtgccgcccacgccgcaccgggttttcagcagacgtgccagctcctgcaggtcggcgtcgcacccgacaaatcccctgacgagcgtcacgaccttgcccccgcgttgcttgcggtcgagccacacacgcagatcctgctgcgccgggggcaatgtcgcgggcccttcggccgtgccggtgtcatattgaaaatcggggttggtcgagtagaccatcccgagcctcgctttccaatcgttgtctgccatattgttcgaatagtaggaatcgaacgtccttttaggacgtcttattttgtgcaaaaataataaaatattacctttgttgacgtatggcgaaaaagttccgcgaaaaactgcgcaaattaaacccgttcacgcgcccggccacgctcgaagagctgcccaaaccgctgccggccaaccccgaccagcggctcgtgaaggtttatgtcgaaggctacgaggacgtggctttctggcgcggcatcttcgaccatttccagaacccctacatgcgtttcgaaatctcggttcccaaccgcgccgacctgcccaagggcaagaaggtgctgatgggcatgatcccccgctcgtcggacgaactgatcctgtgcgtcgactcggatttcgacttcctgttcgccgaccgtacggagcagtcgcgcgaggtcaacaacgcccgctacatgttccacacctacgcctacgccaccgagaatttcctctgctacgccccctcgctgcacaacgtctgcgtcaaggccaccaagaacgatacccggatcttcgatttcgtgcgtttcatgcatgaatattcctgcacgatctacccgctgttcctctggtacgcctactcggcgcagctctcctcggagaacgtctttccgctcatcgacttcaagtcggcggtgcgcatcggctacctcgacctggcggacaacggcgaaaaaacgctcgaatggctccggcgcaacgtggccaaacgcgaggagatgctccgcaagcgcaacccgaagatgatcgaaccgatgaaggagttcgaggagcagctcagggggcgcggcctgacacccgagaacgcctacctgttcatgcacgggcacacgctgatggacaacgtggtgatgatcctgctgaactccgtgtgcgagaagctgcgggcgatgtcgatcgccaagatcacggcttcgaagaagcagggcgtggcgctcaagaacgagatggcgaactacaccaactcgctgcgttcgatccgcgacgtactgctcgacaacgagaactacaccaaatgcccgctctacaaacgcctccagcgcgacatcgaaaaatacatcgcccgcacgatctggaacatgaaacgcagcggcgcgatccgcgacgattcgacctggacggtgctgcgcaacatgcggcaaggctccgaaataaaatagcgaaccggaagcggccccgcggggccgcttccggttttatacaggcacggcgcatccgccgatccccgtccgatcccgccgctaactgcgcttgcgcaccacgcgcacggtggactgcgtcgcctgccgcacgaacacctgcgggccgcgggcgtatttgcgccacagttcgtcggtatagccgcgcacggtcagcaactccatgttctcggccttcatcacgtcgaagcccgcctcgcgcaacgcctcgatcgcctcgtcgatatgccacgagttatcgacgcacaggctcaggttcacggccgagttgtggatcaggttggtcttgatgcggaaacgctccagcagcgagaagatcgtggcgaacttctcctccagcacgaacgaaaaatcgcgggagcggatcgtgagcagcacctggtctttcttgaggatcaggatcggcacgacgaccggcgccgacatgccgcggatcacggtgcccggcttgcgtttgtcgccgaagggacgcacgtagagcgggatattcttgttctgcagcggcttgatcgtcttgggatggatgatctgcgcgccgctgtatgccagttcgatggtatcgaggtagttcagctcggcaatctgctcggcgtcggggaaaatcttggggtcggcgttcagcacgccgtccacatctttccacaccgacatcgactcggcgtcgaggatgttcgccaccacggccgccgagtagtccgagccttcgcggccgagcgtcgtggtcgtcccgtcgggtgccccgccgataaagccctgcccgatgaagatgttctcgacgcactcggccagtgcgtttttcagcagcggctccgaagcttcgaggtcgacccccgcatccttgtggcgctgttccgtgaggaagcagcggcgcatgtcgatccagcggttcgccaccccggcataattgaggtattccgaaatgatggtcgtcgacaccagctcgccgaacgccacgatcgtatcgtaccacagttcggcatcggcgggcttgtagaccgtaccgacagctacgcgctccagttcgtcgaacagggcgtcgaccttctccagcgtcctggggccgtgccacaggtcgttgatgatcccggcatggtactcgcgcagtgccgcgacattctccagcgaaagatccttgtcgcccttctgcaccccttcgaacaccttttcgagcgcattggtcgttttgcccatggccgaaacgatgatgaagaggttttgctcatcgtcgataatcttgcgcaggttgcgcaccccgtcggcattcctcaccgacgcacctccgaatttatagactttcattataccttattttactaacctgactaaaaatcggccggtgccttccatggccagtgaaggcagccggcaatataccgaaaactacttcgcaacgggtttataaggcaccccgatgttctggaacaggaacgcataggtgtccgcctcctcgtcgatacgcttcgaagtgggtttgcctgcgccgtgcccggccttcgactcgatgcggatcaggatcggggcgtcgcccgcctggcaatgctgcatctgggcggtgaacttgaacgagtgcgccgggacgacgcggtcgtcatggtcggcggtcgtcacgagcgtcgcagggtactgcacgccctcgcggatattgtgcaggggcgaatacttatagatatagtcgaactgttcctcgttttcgctcgatccgtactccacggcccagccccagccgatcgtgaatttgtggtaacgcagcatgtccatcacaccgacagccggcaggcagacggcatagaggtcggggcgctgcacctcgcaggcgccgaccagcagtccgccgttcgaaccgcccgcgatggcgagtttgtccttcgaggtatacttgctggcaatcagatactcggccgccgcgatgaaatcatcgaagacgttctgtttgttctccagcatcccggccttgtgccatgcctcgccgtactccgagccgccgcgcaggttcgcttcgcagaagacgccgccctgctcgacgaacatgatggccgagggacggaagccgggcgtgcggttgatctggaacccgccgtaggcatagaggtagcacggatttttgccgtcgagcttcagatccttgcgatgggtgatgaacatcggcaccttcgtaccgtccttcgaggtgtagaacacctgctcggtggtgaacagcgcgggatcgaaattcacgttcggagccttgaacagcgtcgattcgcccgatacgacatcgtacttgtaaatcgtggcgggagccgtgtagcccgacaccgaataatagatttcggcagcctcgtcgtcgccgtcgaagcccgaggcggtgcagatgcccggcagtgcgacatcgcgcaccggccgaccgtcgaagccgtactggacgaccttgctctgtgcatcctgcaaataagaggcgaagaagtatcccccggcggcggtcacattctcgagcaggctcttttcattttccggaatgactgccgttacgctcgacggcgcgttcaggtcgaccttcatcagcgcatagttcgacgcgtccttgttcgttatgtaatagagctggtcgtcacggcactcgacgagcgcgtaatcggcctcgaagcccggcagcagcgtgcggaatttcggctcggaaactttcttatagagtatctcggttcccgacgtaccctccgaagcggagatgaagagccatttgccgtccttcgagggccatgccgagaagtaacgcagcggatgttcggcatccttataaatcagcttgtcagccgactgcggcgtaccgaggcggtggtaatagactttctggaactggttctgcgacgagaacactcctttttcaggagcgtcgtaagcgctgtaatagaaacctttggaatcgggagcccactcggcgccggagaacttgacccagttgatcttatcggtcgtgaacttgcggtcggcggtgttcatcacacgaatctccacccagtccgagccggattcggccaccgcgcaggcgcagtatttcccgtccttggaaaaagccaccgacgaaagcgccaccgtaccgtcgtccgagagcgtattgggatcgaggaacacctcgccctccgcaccgggagccgtcgtacggtagagcaccgactggttccgcagcccgtcgttgtagaaataataccacgcatcgccgtgtttggccgggatgccctccttggggtaattccacaactgggtcagccgcccgcggatcgcgtcgcggaacggaatctgcgacaggtaatcctgcgtcacggcattctgggccttgacccatgccgccgtcgcctccgaattgtcgtcttccagccaacggtagggatccgcgaccttcgtcccgaaatagtcgtccgccacgtcggtgcgctgcgtctcggggtagggcatgtgttttatctgcttcatgtggttgcaacttgccatcatcgccgccgcccccgcgagggccacggccttgcgtatcaatttcatcatagcattccggagtttgggtgaatatcgtggcaaagttaggaaaaaataagaaaccacacacatttttccccttaccggcctgcaaaagggttatttttcaccctacaagccgggaaaccgaagtttttgcgtaactttggcttgcaaaaacaaccgaaaatcatgtacagcgaactcaaaaagataatcgcacaggcctgggaaaaccgggaactactcagcgaagaacccgtacggcaggccgtgcggcaggtggtggaactagtggacaaaggacagctgcgcacggcggagcccgtcgacccggccaaaagcgaatggaaagtcaacgagtgggtcaaaaaggccgtcatcctctattttccgatccagcccatgcgcaagatgcaggccggggaactggagtggtacgacaagatggagatcaagcacggctacgaggagctgggcgtgcgcgtcgtaccgcacgccgtggcgcgctacggcgcctacatcgccccgggtgcgatcctcatgccgtcgtacgtcaacatcggcgcctatgtcgacacgggcacgatggtcgacacgtgggccacggtaggctcctgcgcccagatcggcaagcacgtccacctatcgggcggcgtgggcatcggcggcgtactggaacccgtgcaggccgccccggtcatcatcgaggacaactgcttcatcggctcgcgttcgatcgtggtcgagggggcgcatgtctgccgcgaggcggtgctcggttcgaacaccgtcatcaccggctcgacgcacatcatcgacgtcacggggccggagcccgtcacctacaagggttacgtgccgccgcgttcggtggtcgtcccgggcagctaccgcaaacagttccccgcgggcgaatacagcatcacctgcgcgctgatcatcggccagcgcaaggagtccaccgacaagaaaacctcgctcaacgacgccctgcgcgatttcggcgtatcggtataacccccagtctgcgaaccgccccccccatgaaaaagacactgttcctactgactgcctcggcactgctgtccggatgccgcccgacaggcttccgctatacccttacgggacatatcgaggggctgaacgactcggtcgcactggtcgaatccgtcacgaaagacacgctcaccgtgcttcccgcccccgacggctcgttccgttacaaggggcgctacgacgaaccgacggcagccgccctcgtgcgtaaaaacggacaaaccgccgcggtgctctatatcgagccgggcaatatccgcatcgagggacgcctgaatgccgaggagtccagcaaccacgacaaaatcgagtactatccctccggcaccccggccaacgacgctttcggggcgcacctgcgattcgtgaaccgggcgctgcatgcctacaatttcgaagaccacgaccaggcctaccgcgccgcgctgctcgacagcctgatcggttcctcggcgcgcaacctcgcggccaacaccgacaatatcttcggagtggcgatggtcgacggcgttatccattacgacaaggacatttcgcgggcccgggtcgattcgatcgtcagcctcttcccgcctcacctgcgcacctgccggctgatgaaacgccccctcgaacatatcgagcgcgtgctccggtcgcgggaactcgcccgatacgtggatttcacggcgaacgacgccggaggcaacccggtcacgttaagccaggtcatgaaacgcagccgctacctcctgctcgacttctggttcgccgactgcgtgccctgccgcagcgagatgccgcatatcaggactgcctacgaggcctatcacgacaagggattcgaagtcgtcgggctgtcgacggacaaagacgccggggcatggaaaaaagccatcgccgaagacagaatggcgtggattaacctgacggacgccgacaggcgtgtctgcgacctctactccgtcaccaaattcccgaccaactacctgatcgactgttcgacgggcgaagtcgtcgcccgcgaactgcggggcaaggcgctcgcagaaaccctcggagaacttttcaagcaataacatgatttaccgcatcgcagaaaccacctcgaccaacgacgatgccaagcggccggaataccgtcacggcgacatcgtctgggccgaacggcagaccgccgggcgcgggcagcgggggcattcgtggacgagccccgaaggcgagaacctcaccttcacgctggtgctcgaacccgtgttcctgcccgtcggcgaacagttcctgctctccgaagccgtcacgctggcgcttacggacaccttcgccgccttcggcatcgacgcccgcatcaaatggacgaacgacatctatgtcggcgacaaaaaactggtcggcatcctcatcgagcacagctattcgggcccgaccctcgcgcggacgatcgcgggcatcggcatcaacgtcaaccagcgtgcgttcgaccccgcactgcccaaccccgtgtcgatggcggtcgccagcggccgcacgttcgaccgccgcgaggtgctcgaatccttccatgcctgctgcatgggccgctacgaccagctcgtacggggcgaaaaggcggccttgcaggaagagtaccggaagcgcatgtaccggctgggcgaaacacacccttaccgccgccccgacggcacgctcgtcgaggccgtcctcgaaggcgtacgcccctcgggcgagttgatcctgcgccacgccgacggcacgcggcacgcatacctcttccgggagatcgaattcgtgatcgccgggaaaagctgaattgccataatcattagaatcgatcgcaaaactcccggagggccgtacgctcgaacaggcaacgtcaattccacggagcaggtttcaacgcttcatccccgggattgcggggccctgtcggcaccgtcaagtccggaatttcaggttccgatgacggatattgaaggcgtatcttcgaaaagttgacaaaactcatcccatgcataaactgcaatttccggccgaaaagattaacgtcccatttcacatatcgcttgagattcttttccagcaatgcgaatttggatggcggaatagccaacatacaaggaacataatctattgtaaacgaaacttcttccgtaacacccgctggtgaaatgacataacctattgtaagaacggcttctgcatctgttcgcaacagttcatactcctcccgtgtaaaagtctctgtaaaagccttttccacacatccggggatcgtattcgcaacggcgtattcttcgaattccggttcgatagggctgccatccttataaacttccggtgcattttcccgggtattggttatattggccaaagatagaattacgccctggtagacagaagccaaaaatgtaatcccgtctgcagtaatacgatcccggcccgtatagtaatcctgagcggaaacagttgatccaagccccaaaataataatgatgctaaacactcttttcatatgctattcatttttatattccggacaatcctccatcattttcattaaaacatcgacgttcacagcatcctcggaaaaaggatatagcgtaacatccgcgtatgaacggctcatactccttagcatggacgcggcattccgatattcttctcgaaaattatcactttttatatttccggccataatatatttactcaaagttctaaatatccgtcgcccctcgccttcactgatatatttactgactccgttcatattcccgattttcaaccgatacatataccagcacagtttggcctcgatctcgttattgagccgcatgcccctgtactcttcgggggttttgcccgaacattggtgcgtatggaaaagctcttcgagcaaagtgatatcgtcgagccgagaccccatcctgatctcgaaatcgtcccatacggtaccgccttcgaaagtataggcagtcgggatcatcaccgaacttccgaaaaaaccggtgcggatcgttacattcccccggatcgaaccgataatcttcccggccatgcaatcctggcgcaacgaatccagcaacggttccagtttttccctgctgtcggaagcaagcattatattttcattttcccgataacgggtgttggccggacttcccggattagaggaggcaccgccaccgccgccaccgctgcccgaagggccccgatcctcttcggtaggcttgacgggatccgtatccggacgctcatatttgatatggtttacagggcgctcagcataaaccaccacctcttctattccgccacggtcaaccggctcgcttttctctgactccgcctccgcacgtgtcaccgctgtttcccggctgcacacgacactcaggccatccagcatttcgtccaggcgggcggtattttccgcctgtgtccgcgacttatcgtaaaggaacgcttcagcctggcatgctcctccggcataacgaaccgcatgaaccggaaatccgtcgagcgaggtgtaaaccgccagcccggtgaaatcccccttggagccgctgttgagcagcctgtcgtagtcgtcggccgtgcgccccgcggcatagtccggatcgggaacataaaaacgcagatagctgctcatgacaccgctgcgggaatcctttacgacgaccagtttgtggtagatcggggtaaaacgcggttcgccgtactcgtcgatccgataacgaaaatagcggaactcgccccggacaggcacatcggtactggaaagcacttccccggccgagaccgtcgccagcgaccagtcgggcatataagtcccgagcgtcagcgtcccctcttcactcccggttctggtcggtgccgcaacacgctcgaaatagcggcgtgcctcggccacggacatagtttccggatttccggcctgcgcggtatcattcgccgcatgatcggaacaggccgcgacggcatacaggacaacagtacatcctgcggcaatcaaataggatcgttttttcacaggctgtggtttcagggtttccgtcgtgacgtaagttgttttaaaattaacaaatatttacgacatcccaaaaacttcggatacccttacggttattgagttaaaaatataacataaatccttgctgttacggaaataacagttatatttgcaatgaaaaaaccgcatttgaattttaaacgataaccacaccatgaacgtaccagcaaatctgaaatactcgaacgaccacgagtggtgccgcgtcgagggcgacacggccgtaatcggcatcaccgacttcgcacagagccaattgggcgacatcgtcttcgtagacgtgccgaccgtaggcgaaaccctcgccgcgggcgaagtattcggctcgatcgaagccgtaaaaaccgtgagcgacgcattcctgcccatcggcggcgagatcctcgaattcaacgacgccgtggacgccgaccccgccatcgtcaacaaggacgcatacggcgaaggctggctcgtcaaggtcaggatgtccgacccggccgagtacgacgcactgctgagcgccgcggattacgaaaagctgataggctaaacacaaaaaataaaaagctatgtctaaagttacagtagtaggtgcaggtgccgtaggcgcaacctgcgcaaatgtgatggcttgccgcgaagttgcgagcgaagtcgtcctgatcgacatcaaggaaggtctttcggaaggcaagatgctggacatgtaccagtgctcgacgctgatggatttcgacaccaagctcgtgggcgtcaccaacgactataagcagaccgccaattcggacgtggtagtcatcacctcgggtattccccgcaagccgggcatgacccgcgaggagctgatcggcaccaacgccaacatcatgaagggcgtgatcgagaacgtggtgaaatattcgccccgcgccatcatcatcgtggtagccaacccgatggatacgctgacctatctggcgctcaaggcgtcgggccttccgaagaaccgcatcatcggcatgggcggcgcactcgactcgtcgcgtttcaagtgctacctggccaaggctacgggcgccaacatcaacaatgtcgacggcatggtcatcggcggccacggcgacacgacgatgattccgctcgtctcgaaggccaccgtcaacggcgtacccgtttcgcagttcgcatcgaagaaaaaactcgatgaggccgtagccaacacgatggtgggcggcgcgacgctgaccaaactcatcggcacgtcggcctggtatgcaccgggagccgcttcggccatgatggtcgaggcgatcctcaacgaccagaagaaaatgatcccctgctcgtgctacctcgaaggtgagtacggacagtcggacatctgcatcggcgtgcccgcgatcatcggccgcaaaggcatcgagaagatcgtgaaaatcgacctttcgaaagaagaggccgagaaattcgcagcttcggccgacgccgtccgcaagaccaacaacgtgctccacgagatcaaggcgatttaaactgcgaatacacaacagatttcaaacccgtcccaaacaatctggggcgggtttttcattgcctaaacacctcagcacccgccaatttcgaaccgcatttgctcaccaaacgggctgatttgacatattaaagaattttgcatactatgaattattgccgacctttgccggcgcaattatgaagaatacgagcctacatagcgcaaaaatgaacgccgcccctattcgtaatacgttcgggggggggaattttgccatgtagttgagacaatcgacatatcctttcaacgggaaccgtatccgcatactgcggatacggttcccgtttcattttttacgcggaatcaattttcactttcaaatcaattcatcccatatggaaaaagcaacgtatgaaactccggcaatagaactgctggaaatccgcaccgaacaaggctttgcggtatcggtctccacacccgaaaacggacacgactcattcaccgaagaagattatgaatggtaaacccacaaatgatgatgagcatgagaagtatgaaaacaattctggcctgcgcctgcgccgtgctggcagtctcctgcgccgaaaagaatgaaatcgcaaaacccgctcccgaaacccgtaccattaccctcaacgcaacgtccgaaacaatcgcgtcgcaagacaaaacccgcacggcactggataaggacggtctgagcgtcgtctggaagaaaggtgacctgatccaactgtggtacctcaaaaatgacggatcctacgcaaaagcaggcgaacttgccgccctgtcccaaggcaatagcactacgttcaccggcgaatgcactttcaccgacgaagcggaaacacccgattatctcgcagtttcatgctattgcgccaatggccccgaagtactcaacacggtaaaatacgaaaacgggaaattcatattctccaaccccggagaggcatctgccgtattcaaaccatcgctcaactacccttcgcccaactcctatgagttcgcagttcgtaaccctgccgtcgcccacggcaccgatctgaacgccatgacattcaaaaatatattcggcgtcatgaagttgacgatccagacaagacgcagtgcacaataccagattactttccaagccacaggtatggcccaaagaaaggacttcaccggagaatatcattacgaccctgcgaccggaaccggagaattaataagagatcataccacctctccgatcaccatcgaaccgcaagggcagaatatcggcgcagaattcgtgtattatatccccgtcgctcccggcacctacaacgatttcaccatgaaagtttacgatttcggagaggattactacgaacgaaaagcgaccaaaccgctcgaaataaaggctggtgtcatcaccaacctcggaagattcatagataatttacaataattcgaaccgcccgacaacacaaacgtccgaagtcagacttcggacgtttgtcgtattcagcagtcccaaaaggagggaatcagaaactgaacttcgcgccgacgaaccagctgcggggcagcgacgggccgtaaatgtagcccgagtcgcggtctacacccttgtcgaagtccttctggtaggcgttgaacaggttctgcacaccgccatagagctgcatggttatctccttgtagatacgcacgtcgtacgacaggcgaatattcatgtcgaagaacgacggggtcgagacggccacgtcctgcgcgacgcccgacccggccatgtgctgcaccagcatcgacccggtgcaggttcccgacaggtcggccgtgaaattccgcaccggtttgaacgacgcggtgaaatagccgtaggcatcgggcgtgcggaacatccggcgcacgggcggcacctctgcgtcctcgctccagaattcgggctccttgtaacggctctgctgaagcgtcacgcccgcctgcaactcgaaccagcgggtaaaggccgcgcgcccctcgacattgaagccgcgcaccgtggcccccgaaccgttgtagcgttccttgaccttaccgccgtcggccgcatcgtccatgtcgcgcagggcgaacacgtcgtcgaggatcgtatagaaaccctcgaccagcaggttggtctgcaccttcccgaacgtatggtaaaggtcggccgagaggctcacgctgtgcgagcgctcctccctcaggtcatccgccagccggatgcgcacccgcttaccgcccacgatggcgatgtgcatgtcctcatcgaacgcctgcggggcccggtagcccccggcgtagctcacgcgcaggttcaccgcttccgacgggttgaaacgcacgttgacgcgcgggctgaaaatcacatggtctacgaggttgtgcttgtcgaggcggccgccgacaagcagcgaccacttcctggtcttccactcgttctgcagataggcacccacgatatgcaccgtctgatcggtgtggatatcataaccgatcgaacggtcgcccaggtcgtcgtaactgtactccgtaccgaaggtcagttccgagggcatgaatagcagcttcctgaactcgtggatatactgcatccccgccgccacggtcaggtcgtgcgtcgtcccgtaggcatcgggatcctgtttgctgccgtagtagctcttgcgcgccgtattctgaaacgaggcataggcattgaagcggttgcggcggtcgggcgacgagatgtcgaacgaaaggctgcccccgtcgatcgaatggtcgatctgctcggcgatcagcgcctcgtggggcggccggtcgagcatgtcgcccccgcggcggaattcgttgatatggtggtactgcgccgtgatgcgcgaataggcgcccgtacggaagaacgtacgcatgcccaccgactggctgttgatgacgggcacttcggtgaagccgtcgccgtcgtggtcgtagcccgaacggtggcggctctggccgaagacgcaaagccccgcccggccgctctcggtgacgagcgaagcattgagcatcgtattgttgtcataggaattgctgccgccgatcgaagtgagcgtatgcgacatctgcgccgaattgcgcgaaggctccttcgtaatgacgttgatcgtgccgccgatggccgacgacccgaacagcgccgagccgccgccgcgcagcacctcgacccgctcgatcatgttggccgggatctgttccaggccgtatacgcccgtcagggccgagaataccgggtgcgaatcgaccaggatctgcgaataatggccgtcgaggccgttgatgcgcacctgcgtgaagccgcagttctggcagtcgtcctcgacacgcacgccgggctggaacgacagcccctgtgccaggcacgaggcattggtcttctcgaacaacccggcgtccagcacgctcaccagcgcaggcgcctcccggcgcagccgggcggaacggctggccgacacgaccacctcgtccatcgagatgccgctctgcaccacctcgaaattcagttcggccgtctgtccacgtcgaagcgtcacctgctgcgtctgcgaggcataacccaacgcgcggacttcgagcgtcagcgcgccctcgggcaggtttttcaggaaataatgccccgaagcgtcggtcgtggtaccgaatgccgtgcccgtcacggcgatggtcgcatagggaatatgttcatgcgtgtcgcagtcgaccacatggccgaagatattggcgtcggtacttttcttcggcgcctcgacaccaagtaccagtacacaccggcacatgacgagtgccagcaaaatatattttttcattgcttgtcagataataaatagtatgggccgggctgcatgcacccggaatatgaatcaggaaaatggaggggatcgccggttacgcgacagggggcgcacgcagcgaaatgcccgacgcctgctcatagagtttgcagcgggttgcctcgggcagcagcacggccagcatctctgcatagaacgagtgcacggtcggcgcgatgtcgaggtaggggaagaaatagaaatcgtcgatgatacacctgtcgacgatgatcgtatgggcaccgttgtcgggcaccagatcgccgcagtgcgcggagaaatgcgcatggtcttcgttgtagatatgcaccttctgccccgcgtaggccgcgagcagaaccaacagcagcaaagccgcatacagtcttttgggtgcgtagcgtatcatctttccgagccaaagatagcaataaaaaagggccgttcaaaacggccctgcaaaaataccctaaaatggggatatatgtcgtgtccacgtacccggatgccgggaggcggacgatgggcgccgccaccctgcggatcgggcgcctcagatgctgatgtcgaggatctcgaaatggatcgtcccggcaggcacctccacgtcgacgcggtcgcctttcttgtgccccagcaatgccttggcgatgggcgtaccgatcgccagcttgccttcgcgcaggttggcctcgtgctcagcgacgatcgtgtaggccacctctttcttggtgttgtggttcagcagcgacactttgctcagtatctgcaccttgctcttgtcgatcttcgactcgtcgatcacgcgggcattagcgagcgaatcctccagcttggcgatacgcatctccagcagaccctgcgcctcacgggcggcgtcgtactccgcgttctccgaaaggtcacccttgtcgcgcgcttcggcaatagccgccgatatcgccggacgctcgacggaacgcatgtggtcgagctcatccttgagttttttgtaaccctccgctgtcagataaataatctcttttgccataatattaaacgagtccgacgcacttgaatttcataacgctgcgaaagattccgaacatggggcccgtcgaactcacattaggcatccgcagatgcccgtcccacatccaaaatcctcctgtattcccctttgcggcgggggaaccctgtaaaacaaacaacgtaaaaaaataagaatcctgaccggtgaaggccagaaccctgtttccattgtatacagcaaagataaaaagttattttctaatttccaaatctttttttcgcggcgcatggcacggagtatgcgcctcgcgcgggatatgtatatcgtactcctgctccacttagcctgggcgctcatggccgtccccgtcgtcacgcgccagcaacgcgtccccgcctcggcagcgacctggctggcgctgatcctgctgctgcccgtcgccggcacgctgctctacatactggccggctaccgccgcaacggccccacggcggattgccccgcctgccgcggcgaccgcctcgaacagatcatcgcccacggatgcggcacacgccccacccggtacaaccgcgtcgggctgctccacaacggcaacaacgccttcacggcactgatcgcctcgctgcaacgggccacgcgctcgatccacatggagtactacatcatccgagacgaccgcatcgggcgcaccatcgccgaaatactgatccgcaaagcccgcgcggggctcgaggtgcgggtgatctacgatgccatcggctcgtggcgcctgagccgcaagacactgcgccgcatgcacgacgcgggggtagagacggcggctttcgaaccgatccgcttcccgtggttcaccacgcgcgtcacgcaccgcaaccaccgcaagatagtggtcaccgacggcaaggtcgcctacctgggcggcataaacatcgccaaatactacctcgacggggattacatgggcaaatggcgcgacgaacacctgcgcgtggagggcgacgccgtggccgacctgcaacggctcttcatcgccgactgggcgcgcgtacgcggtgaatacctcgacagccgccgctacatcgccccgcacggcatccggcggcgactgccgatccagctggcctgggccgaggaggggccctcgcggctgaccatcgccgacgcctttgcctcggccatcgtccgggcgcaccgcaccatacgcatctcctcgccctatttcctgcccccggccctgttgctcgacgcgctccggctggcggcacgcggcggggtgcgggtacaggtgatgatcccctcgtgcagcgactcgccgttcaccgacctgatttccgactcctacatcgacgacctgctcgacgccggggtcgaactctaccgctacgacaacggcttcctgcacgccaagctgctgatcgtcgacgaggacaccgcctcagtcggcacggcgaacatggattaccgcagcctgctggacaacctcgaagtcacggctttcatccgcgaccggagcgtcgtgcgggcactctcggccacctacgacgacgacctggcctcgtgccgccggatcgcgcgggaaacatggcggcccgcggcgtggcggcgcacattgggtgacgcgctgcggctggtctcgcccctgatgtagcgcaagccgcggatcggcatttccgcaccgggcccggcgcaccgttcccctgatttccgtaattttcccctcttcccgcctgcctgtccgcgccgccggggagaggctcccctccgcccgccatcggcgccggaagcgcctccggccacggattcggatgccgccgtgcggcatcccgggagacccgcgggccgcccgcccgggcgggagcgggaaatacggcgcggcaccttattgttacgcacaataattttttttggaaatcgttaatttatgcgtaactttgcgcgataaagcgccgtaaaagatttatcaatgaagcagacttttttatacgccgtgtgcggggtgattctggtcaccgcatttagcggatgcgcaggcatcaactccctgctcaaaagcggacaacccgaactgatttacagcaaggcgctggagtactaccagaaagagaagtggtcgcgtgcctcgacgctcttcgagggcgtccagcactactacatcggcacgccgcgcgaagacagcgtctcgttcttcaacgcccgctgcaagttcaagaaccgcgactatgacaccgcctcggccctgttcgacgatttccgccgcaagttcggccgcagcgccttcatcgaagacgccgaaggcatgtacgcactctgcttctactacctctcgcccggcccctcgcgcgaccagacgatgaccgggcaggcactgatcgccatcaacgagttcatgtcgcgctacccccacagcgaccgcgtcgaggatttcaagcagatcaacggcgaactgacgcagcgcctgcacgacaagtcctacctgaacgcatacacctactataagataggccgctacaaatcggccatcgtatcgctgaaaaatgcgctcaaacaattcccagacagcaaccaccgcgaggagatcatgtacatgatcgtggacgccagctaccgcttcgccaacaactcgatcgccaacaagcagaccgaccgctatctctcgatgctcgactcctacctctcgttcaaggaggagttccccgaatcgaaatacaccaaggaggtcgaccgcatggccaagcacgcacgggactacctcgaccgcaacaagaaggacgaagacaaagacaacaacatataacaatggaaatcaagaagaacatccccaacaacaccatcacgcgcaagctggtggatctggacaaggaaacgggcaacatctacgaaacggtgaacatcatcgcccgccgtgccaaccagatctcgaccgaactgaagaccgagctcagccgcaagctcgccgacttctcttcgccgacggacaccatggaggagaccttcgagaaccgcgagcagatcgaaatctcgcgctactacgaacgcctgcccaagcctgcgatcatcgccaccgaggagttcctcgacggcgaactcttctacaaagagaacaaagaggccaaggagtcctaacgataccgccatgaatttgcagggaggtggcatacagggccccggcgcaggcactgcctgtccggccgaaggattggccggacggcacatactgctgggcatcacgggaagcatagcggcctacaaggcggctgtgctctgtcgtttattgaggacggcgggcgccgaggtgcgtgtcgtgatgaccccgctggccaagcagttcatcaccccgctgacgatggccacgctctccaggaacccgatcctcgtggagttcttcgaccccgagaacggggcctggaattcccatgtctcgctcggcgagtgggccgactgctacctgatcgcccccgccacggccaatacactggccaaaatggcatgcggcatcgccgacaacctgctgctgacgacctacctctcggcccgctgcccggtggtcgtcgcccccgccatggatctggacatgtacgcccaccccacgacccaggagaacctgcgccggctggccgggcacggcgtgcggatcgtcgaacccgccgaaggggagctcgccagcgggctcacgggcaagggacgcatggccgaacctgcggaaatcgccgcttatgtcggcaccctcctcgccgcggaaaaccccgaaaaaaaaaagcacctgtccggtaaacacttcgtcgtaacggcaggcgccacgatcgaagccatcgaccccgtgcggttcatctcgaaccactcgtcgggcaaaatgggctacgccatcgccggagcgctggccgcacgcggtgcgcaggtgaccctcgtcacggggcgcacgtcgctgccgactcctccgggcgtggagcgcgtggacgtgctctctgccgccgagatgtacgacgccgcgaccggggctttcgacggcgccgacggcgctgtcatgtgcgccgccgtggcagactatacgcccgacacggtttcgcagaccaagctcaagaagggcgagggggaaatgcacatcaccctgcgccgtacgcgcgacatcgccgcagagttgggagccgccaaaggcggccgcctgctggtcggcttcgccctcgaaacacacgacgaacaggccaacgccgaggcgaagctcgtgcgaaagaacttcgatttcatcgtcctcaactcgctgcgcgacgccggcgcgggattccgcggcgacaccaacaaggtgaccttcatcgaccgcaacggccgcgagccgctgcccctgatgccgaagagcgaagtagccggacgtatcgtcgacaaaatcgaatcactgttaaaataaagaccgccatgttacgccgtctgtcggttgagaactacgtgcttatcgacaagctcgaaatggagctggatccccacctgaacatcatcacgggtgaaacgggagccggcaaatccatcctgctcggtgccctcggcctgctgctgggcgccaagaacgatggctcggccatgaaggacgccgcacgcaactgcgtggtcgaaggcaccttcgacctctcggggcgcgacatggaggctttcttcgccgggaacgacctcgactatgcgccggagactaccgtaacgcgcatgataactccggccggcaagagccgcgccttcatcaacgacctcccggtgcagctggcgcagctgcgcgaattcggcacccgcctgatcgacatccactcgcaacatcagaacctgatcctctcctcggaagagttccgcacctcggcgctcgacaccgtggccgggaacggggaactgctcgcacaatatgccgcgcagtacacgcggcttacggaactgcggcgccggctcgccgccctgcgcgaagccgccgccggcggacgccgcgacgaggagtggctccgcttccagagcgaagaactcacggctgccaacctgcgcgaaggggaacaggccgccatcgaggaagaactggccgtactggagaacgccgaccgcatcggcgaggtgctcactacgctccgcaacgccctcgatgccgacgaaaccggggtgctcacgctcctgaaaaattccgagaacgacctgacacgcatccgcgaacatttccccgcggccggggaatacgccgcacgcctgcactccgtactcgaggagctgaaggacatcgacaacgctgtagccgccgacagcgaacgcctcgacgccgaccccgaacggcaggccaaactcgccgcacgcctcgacgccctctacgccctgcaacaaaagcaccgcgtcgcctccgaagcggagctgatcgcagcccgcgaccgctatgccgcacagctcgccgccatcgtacacggcgacgaagagatcgcagcggctgaaaaagaactggacgcagccgcacagaaggccggctcgctggccgacaggctgcacaaggcacgcgcaaaagccgccccggccttcgaaaaacagatactggcgacgctcgtgcagctgggcatgcccgaaaccgtattccgagtagcgctcaccccgctccccgacctcgggcgcacgggaggcgacggcgtggcattcctcttctcggccaaccgcaacgcgacgccccagagtgtcgagcgtatcgcttcgggcggtgagctctcgcgtgtcatgctggcgctcaaggccctgcttgcccggcggatgcagttgccgacggtcatcttcgacgagatcgacacgggcgtctccgggcgcatcgccgacgccatgggcgagatcatcgaatcactctccgcgacgttgcaggtcgtggacatcacccacctgccgcaggtggcgtcgaaaggcgcagcccatttcgtggtctacaaacgcgacgggcgcaccggcatcacgcgcctgacggacgaggagcgcatcaccgagatcgccaagatgctctccggcagccgcatcaccgatgccgccatagcccaggcacgcattctgctgggcaaataaccgcacacgcaactacccgccggccggaacgaaccttttgtccggcgcactttatgaactccgtatattgaccccgacatttaccgcacaatgaatgaattgacgaagattgcggccgccaaccagcagcgcgcccgcgaggttatccgcgactccgggctcgaagccgcatggcgctccgtcggcgccgaacccaacctggtcgggtcgctccgcacgggactgctgataacgcaccgcgacatcgacttccacatttactcctcaccgctgcgccttgcggacagcttcgccgccatggcgcgcctggccgaaaacagccgcatccgcagcatcaccttcaacaacctgctcgacgcccccgaccaatgcctcgaatggcatgcctggtatgccgatgccgacgaccggttatggcagatcgacatgatccacatgccgaaaggttcggcctacgacggctatttcgaacgggtagccgaccgcatcgccgccgtgctgaccgaccggacgcgcgaaacgatcctccggctcaaatacgaaaccccggaggcggagaagatcatgggtatcgaatattaccaggccgtactgcgcgacggcgtgggcacctacgcggaattcgaagcctggcgtgccgcccaccccgtgacggggattctggagtggatgccctgacaaaaagtggagccccgtcctgcaagggaaggatcggaaccgggagccgggaacagggccggcaatggcgcagcacacgccgccagtatcgggcattcaacaccgtgcatcaggcaatccggcatccccgggacacgcagcgcatgacaacaagcccgcacataaaaaaaagcaaccccgcagggttgcttttttcaatcggcgacggcaccgcagcccgcctcggccgctatcggcacgggctcagtcagcccggtatttcctgttggtgacgtcgatcgtccgggcttcgaacagccccaggtcagcggcagggcaagcattcgcagggacattcctgccatcgtaaatatcggcaaaattatagctgttgtccgtagtcagccagttccacatctcgggatatacctccttgatatgcaccgattcgcgcggatagttgaaccagtcaaacccgcagaggtagccgcctttctcgtcgacatattccgtccccgtggtggtgatcaccagtccgtagggcaatttgtccttgtcgaacgaatcgttcaggtaggcagtcgacaaggcatagagttccacgccgttatccacctcgatataccactcaacgcgcatcacaccgtccccttcgatcttcgacacgtcccagttgcggatcgtcgaccccaggtactccccgaccttgatattggccttgtcgtaggtattgagcgttccctccatcgacttgaaatactgcgaccggcaatcggcaccttcgggggtgatcaaccccttgaagatacgcttgccgcccttgtaaacgacacatcccagtttgatggatttcgtcgaccccaacgccacgggctgtacgccgaacccgaagatattctgccgggtctggtacagcacatggatgaccaggtcgttgtaatcgtaatccccgcgcctggagtcctcgaaacatactacctggaacaactgcgatttgttgcctgcgaaattggggtactcatcgcgcgggacgaacgtcgtcgtcaacccctcgtccgaacgggtcagggtcatccgcggcacccagatcgtcatggggctttcggcttcggccagcgtcaccccgtatgccttcactacggtgatgcaaccttctttcacggggacatcgtacgtgccggccgtttggtaatggtcgatgtcgacgtccacgggactgccgggacggacatcgcttttctcaatgcaggaggcagccaggaaggccagcattaagatggtaattttcttcattgtgggtgtgttagattaataaaatggttccgcatctcccgttgcacttcttccccactcctgggaaccgattattttgctcggacaaagttagatattcccgcctcaaacaccaaacaaatcagccaaaaacgcactcaatacagcccaatttcattttcaaagcccgcctgccgcaccggcagggcctgaggctgtaattttcgcattcggcctgccgatcatagcaatggcctatcgcatcgacggcatttcggactgccacacacccggctcatagctcccgggcgcatgagcgacaaagacgcagccgacactacaagcccgggcaattcgccggggcacagatcggctcggccggcatatgatagatgccaaaccgcaaatgcgcggacaggaatagccctgcggccaacgaagtacccgccgccccgggcggaacccctcccggccaaccacccgcggcgccggagaatgccgcttcgaccgcttcgcggcaaaacaaaaaccggagcctcagcggaggctccggttttccatattgcgaaccgatgattacatcatgccgcccataccgcctgcgggcatcgcaggcatggcgggagcatcggatttcttctccgccagcacgcattcggtggtcaggaacatcgaagcgatcgaagcggcattctccagcgcaacgcgcgacaccttcgtcgggtcgatgataccggccttcaacaagtcttcatacttgtcgtcgcgggcattgtaaccgaaggcatccttgccctccttcaccttgttgacaacgaccgaaccttcgccgccggcgttctcgacgatctggcgcagcggctcttcgatcgcacgtttcacgatctgaataccggtcgtctggtcttcgttggcacccttcatcccttcgagggccgccgtagcgcggatgtaagccacaccgccgcccgggacgatcccctcttcgacagcggcacgggtcgcagccagtgcgtcgtccacgcggtctttcttctccttcatctcgacttcggtagcggcacccacatagagtacggccacaccgccggccagtttggccagacgctcctggagcttctccttatcgtaatccgacgtagccttgtcgatcgaggagcggatctgagccacgcgggctgcgatctcctccttcttgccggcaccgtcgacgatcgtagtgttctccttattgagcgtcaccttgtcggccgtaccgagcatcgtaaggtcggtatcctccatcttcatacccttgtcggtcgagatcaccgtagcacccgtcaagatagcgatatcctcgagcatctccttgcggcggtcaccgaagcccggagccttgcaggctgcgatcttcagcgtaccgcgcagcttgttgaccacgagcgccgacagcgcctcgccgtccacgtcctcggcgatgatcagcagcgaacggccgctctgcgccaccggctcgagcacgcccatcagctccttcatcgtcgaaatcttcttgtcggtaatcaggatgtaaggcttctcgagctgtgcctccatcttctcgggatcggtcatgaagtaagccgagatataaccgcggtcgaactgcataccctctacgacctccacatgggtctcggtacccttggcctcctcgacggtgatcacaccctcgttgttgaccttggccatcgcctcggcgatcagcttaccgatcgtctcgtcgttgttggccgaaatagtggccacctgctcgatcttgtcgaaatccgagcctacctcctggctctgcttgcgcagggactcgaccactttggccacggccttgtcgatgccgcgtttgagatccatcggattggcaccggccgtcacgttcttcaggcctacgccgatgatcgactgtgcgagcaccgtggcagtcgtcgtaccgtcgccggcatcgtcgttggtcttcgaagcgacctcgcgtaccatctgggcgcccatgttggcgaaagcgtcttcgagctccacctccttggccaccgtcacaccgtccttggtgatctgcggcgcaccgaatttcttgtcgatgatcacattacggcctttggggcccagcgtcaccttcactgcgttcgacagcgcatcgacaccctccttgagcagttcgcgcgcctcaacattatatttgatatcttttgccataactttatattttatattcgttcataagcttatccccggagtcccccatttcaaggggattttcagagggaatgtaaaaatttcgaggtcagaacgaccggttatcgtcagataatcgccaaaatatcgttctgcttcatgatcaggtaatccacgccgtcgacctgaatctcctgcccggcatacttgccgtaaagtacctggtcgccgaccttgacttccattttgacctccgaagtaccggggcccacagcgactactttacctgccagcggtttctccttcgccgtgtcggggatgatcagtccgccggccgttttctcctccgcgggattcgggaggacgagtacacgatccgataatggttttacattcatagcttttcagtttttagtttattattgaatagtttgttgcgcgttagcacccatagtcccatcaatagatgtgccaaccgttttttggcagacgccaggtgacaaaggtacagtccggcctgccattttgtcacccgggagattttcccgaagatttttcacctttttttttgcacggacaaaaaaagtatattacatttgcatcccgatacgaccgttcgacggtcacacggtggatgtagctcagtcggttagagcgtcggattgtggttccgaaggtcgtgggttcgagccccatcttccacccgaaaaggtcttcgaaagaagaccttttttgttggcagatagccgcaaatcagcgcaaacaatcctgtatatcaacgacatgcggaattatttcgttttcaggccattgataaaacgctccgaacagcttatcggacgggaaatgcagaagatcggccaagtgttcgccgcggcaaactgaacggcggtaaataaggaaccgggcatcggagcagttaatggctccgatgcccggttgcctatcaaaaatctactccgcactttggctacagcagttcggtgccgcagggaaagacctgcatggggtacggttcagcaaccgtttcatgcgacaactatttttccggcgttttatatccgatcagccggggctgcttgcgggcctgcggggttttgacagacagggcggcgattgcctgatagatattgtccaattccctgcgcatatcttccgaaaggtcgtttatcgcttcggcgttgtcctcgtcggtacgctccagcagggccagtttcgcacgaatttcagccagttctgccgtgacggtcgtcgtcgtagcgatgtagttgcgcatggcgacaaaggctttcataattgaaatacagacttgtatagctggtttactgcgcaatactgcggacaacatggcgacaccttattcggtaaaagcaagcggcaaagatgatttcggacgctttgtccgggatgtcgtaacaaattgtgatgagatatgttcccattcgcttgcggaaatacgaaacataaattcttccgggaaccgctctgcattacgttttacggcctgattcatggcactcgtcgtaacctgatacagtgccaccaggtcgaagtcgagcatcacgcgctggccgcggatttcgtagattttattttggataagggttatatcattcataagttcgggttgtgggggctgattctggtgtcggcagttattcgaatttttctaataactcgatttgccgccgacttccgggcgttatttcttgctctgctgtttgtaatagtcgaattgtttccggcaaacatcctctacaatattaaacaataaatccactttggggacaagcgcgtctacaacctcctttggaacaacaaatttgtcgttatagcgggcttcgatataggagcgttcgagcaattcgaaaaggtgtttttcttcttcggtgtctaatggaaacacctttgccaattccaacgtataagccttgcacttttcaatcaggaatttcagaacatgtttgcgcggcatctacggggcgggcggattctccggcctgctccgggggggggcggtttctgcgttgaattcttctattgagtgaagttgcgtcactgtgttcagcggaaccgccccttttttcatgccgatactttcgcatgcgaatcggcaaaacggcacatgcattgataaacagagcaatgaccgaaaaagccacgcacggacgaaaaccagccgacaatacgaaaaccgccaccgacccataaacgaaccctaaaaaccgcttctgcctatgacgcaatgaacagacaccggaatttccccgttgcacaccggatcagcccgccgacccgaaacatccgattcaaccgaacacctaataaacccatcattttatgaaaaaatacgcaatcatccttaccgccgcgctcttcgtgtgcgcattctccggatgcgacgaagagacaaccctcccctacatcccggtcgaaaagccggacgacaacacgccgcccgaaggagacgaccccgacacctacaccgtcgcctaccggctcgacaaggtgctgctgtgcgcgcccgagaatccgaacggcaccgacatctacggcaaactggactatttcccttcgctgcgcatgacgctcaacgtgtcgccgctcgcaaccaccgtcacgttcgacaacggcgacatccctttcgtaccgttccccgaagcgctgtccgaaggccccatccagtgtgtgctggacagcaacgtcatccccaacgtgctgcgggtcaaaggttcggacacggtcatcgccaccttcgacgcggacggttttacgacccagttccaactggacagcaaactcctgacatacaaatacaaattcaagagactctaataccatccgaccatgaaaaaactcaacagacataaaatactctccgcggcgtgcatcgccgcgctgccgctgctcgtagtcgcctgcctcgaattcgacggcatcatccagccgggccgggccctgaccgactcggaaatcgaagtgacggcccagctccgggtctcgccgggcgaagacggctcgggaaaggtcgtattcgccgtattggcccccaaggcatggaacctccgcgacaatgccacgctctatttgaccaccaaggactacaacgcgatccagcaccagcccgaagtcgtgaacgaacaactcaccctgatgcccgcagaggagaaagaccccaagaacggtctttcgtgggcggactccttcatgagcgtcatcggccgcggcggcaacgacccccagacggcaatggagtgggtcgtatggcgttcgtcgaccacattcatattcgacgacaagatcgaagtggacggacaggaagtcgagaccgccgacgtgcataccgacgtcaggatcaaaatgaagaccggcgccgttcccctgacctgcgaactgggttactcgtattgctacgacacgttcggcctcaaacgcgacgaacagcgtttcgccgaagcattcaagcccatcgaaacctacaaccaggtgtttaccacgacgccctcggtattccgctacggcgacgtcttcggcatcaccttctcgcacggaggcacggcactgaaagacgccggggaggtatatctctgcggcacggcaatccatgacggcgggcagaaagccgaggtctcggccgcagtcccgcgcaaccgcatggaactgatcagctcccgtttcgagaaatacctctacccgaaggatttcttcggccttccgtccgacgccgtgatcgaagaactctacttctatttcatcaatgccgacggcagcatcgtcgtcaaagacgatgaaaacggcgggcaggagttcttcgtcgaacagtccgacgaataaccgcccgcccgggataccgcccctcagagacgcgaagcctgtgccgcaccttgcgacacaggcttcgcccgtttccggccctgcaaaacggcggcgaaatcccccgtccccgcccctgagggcagccctgccgccccacctgacggcgacctgcgggggcaaaaaaatccccgggcggcgatgccacccggggaaaatcatgcggcacgagcggccgcacgtcgcaaattacttgcggtagatcttcgtgtaaccatagatcgcctcgtcaccgagctcctcctcgatgcgcagcagctggttgtacttggccatacgatccgaacgcgatgccgaaccggtcttgatctgacccgagttggttgccacggcgatgtctgcgatcgtcgaatcctcggtctcgcccgaacggtgcgacgtaaccgatgtgtaacctgcacggtgggccatctcgatggcgtcgagcgtctcggtcagcgtaccgatctggtttaccttgatcaggatcgagttggcgcaaccggtctcgatacccttcttcaggaaatctacgttggtcacgaacaggtcgtcgcccacgagctggcatttgtcgccgatctcggcagtcagcagctgccagccttcccagtcgttctccgacataccgtcctcgatcgagtcgatggggtatttcgctacgagcgacttgaggtactctacctgctccttcgagctgcgcttggcacccttctcgccttcgaacttggtgtagtcgtacacgccgtcggcgtagaactccgacgaagcgcagtccatgccgatcgacacgtcaccgccttcgcatttgcggccaggcttgtaaccggccatcttgattgcctcgaggatcgactcgatagcgtcctccgtaccgttcagcgcgggagcgaaaccgccctcgtcaccgaccgccgtcgaaaggttgcgcttgtggagcaccttcttcaggttgtggaatacctcggcgcccatgcggatagcctccttgaacgtgggggcacccacgggacggatcatgaactcctggaatgcgatcggggcgtccgagtgcgaaccgccgttgatgatgttcatcatcgggacgggcagcgtcttggcgttcgcaccgccgatatagcggtagagcggcatgccgaaatagtcggcagcggcacgtgcaacggccagcgacacgccgaggatggcgtttgcgccgagcttcgacttggtaggcgtaccgtcgagcgcgatcatggccttgtcgatacccacctggtcggcaacgttcatgccgatgatggccggggcgatcacctcgttgacattcttgacggcgttcagtacgcccttgcccaggtaacggcccttgtcgccgtcgcggagctcgagcgcttcgtgctcgcccgtcgatgcgccgctcggaacggctgcgcgtccgaatgcacccgaaacggtgcgaacttcgacctcgatggtcggattgcctcgcgagtcgaggatttcccttgcgtgaatctctacaatctgcatagttgtaaacgtttgaatttatggtttgaaataatgacttccttttttgcaccgcaaaggtacaaaataattgtgaattgaggtttcctaattgttatttttttcacgaacggcgcctcgggtttcgggggaatcccataaattattatctttgcccccgaatgcaccccatatacccctaaacaactatcaattaatgcgaaaagtcctctccttctccttgttcctgatgctgggactcgtcatctcccaactcctcccgggggcgctcggtgcaggatacgcaagcttcaaagcctgctccgacaccctgctttacgtctgcctggggttcatcatgatcaacgtggggcgcgaattcgagatcgacaaatcccgctggcgctcctacacggccgactacttcatcgccatggccaccgcggcgctgccctggatactcatcgtactctactatattttcgtcctgctgccgcccccgctgtggggcagcggcgaagcctggaaggagaacctgctgctgagccgtttcgcagccccgacctcggccggcatcctcttcacgatgctcgcggcgctgagcctcaaaaaaagctggatatacaaaaagatacaggtgctggcgattttcgacgacctggacaccatcctgctgatgatccccctgcaaatcctgatgatcggcctcaaatggcagatgttcgccatcatcgccatcgtcgtcgtgctgctggccgccggctggcgctggcaggcgcggtggaacgtacggcaggactggaaaaccatcctcgggctggccgtcgtggtctgcgccctgacgcaggcggtctacatcgccacggcgaagctctacggccccgaaaacagcatccatatcgaagtgctgctcccggctttcgtcgtgggcatgctcatgaaacacaagcacatcgacacacctgcggagcaacgcgtctccaccggcatatcgtttctcttcatgctgctggtaggcctcagcatgccgctcgtcacgggagccccggccgacaccgcggccgccgcttcggtcacgggatcgcagcccatgatgccgtggggcaccctcctcctgcatgtcgtggcggtatccgtactttcgaacctgggcaagctcgtgccgctcttcttctaccgcgaccgcaaggtcagcgagcgcctggcgctctcgatcggcatgttcacccgcggcgaagtgggcgcaggcgtaatcttcatcgccctcggatacagcctcggcggcccggtactcatcatctcggtgctcacgctggtgctgaacctcatcctcacgggcggcttcgtggtctgggtcaagaaactcgccctgcgcagttacacccccgaaccggaagcataacacgccctccggggaggctcccgaaaatactacggactaaaaacgacgacgactttgatcgaaattacagacacggccctgcaggcggctgccgccgaagggatggacgcattcctccgggcctttaccgacaaataccgcgaggctctcggcggcgaccccacggccgagacgatctcccggctcaacggcgaacagcattcgctgcttgcctaccggatcttccgcgacgaagtgaccgaaggcgggttctgccagcttatccagaacggatacggggcctacatcttcggcaacccgttcgccagggtaatgcgcctgtggggcgcggaacggttctcgaaactggtatacgccgcgaaaaaaatctacgacgcccaccgcgaagacctcgaaagggagcgcaccgacgaggagttcatggccatgtacgagcagtacgaagcgttcgacgagctggaggaggagttcggcgagatggaagaggaggtgaccgaaacgctcgcccgctatgtagacgggcacccggaactgttcgccacaatagtcggatagacacccccgcaggcaccgcagctatgccgcgggcgccgcaccgctacatcgctacatcacctctccgccgcaaacggaaggcggcagggacgtttgaggcgctattgtccgatccttttgcagacatccacccactccgcacaccgggaataccgctccagctccgcaaccgtgagttcgatggcgctgttgctgctcccgcatgccggaaagacggttccgaacctccggagggattcgtccagatagaccgccaccccgtcgttcaccccgaacgggcagactccgcccacggcatggccgatatgctcctccacctccggcggggtcagcatccgggccttggcatggaatttcgccttgtatttcgcgttgtcgatcttacagtcgccggccgtcacgatcacgatatacccctccccgacgccgaacgacagggatttggcgatccggccgggttcgcaccccaatgccttcgccgccagctcgaccgtggcgctcgacacgccgaattccagcaccctgcccgcagcgccgtattgttccagataagccctgacccgttctattgccatatgattctccgatttgctgttttcgtatatccgtccgcccgctgccctgcgcccgtcagcgcatcagcaccgacgagtcgccgtagctcaggaagcggaaatcatgcgagagcgcatagtcgtaaatgcgccgccagtcttcgcccgcaaatgccgagaccagcagcagcaacgtcgacttcggctggtggaaattggtgatgatgttgcgcacgatgcggaactcgtaccccagcggcgcaatcatgatttgcgtcgcggccttgatccggtcgagccccttcgcatccatataagcgagcagctcctccagcgcatcgcgccccgtgtaatccgccggaatgtcgtacaactcccactgcccgacaacccgccccgtatcgggggttcccgccgtgcggatacgccacgccagcgccggaagcgattcgagcgtccgcaccgaggtcgtccccacggccgtgaccgcgcccagcttggcgagcagcgccacgacggtcgcacgccgcacctcgaaatgctcggtgtgcatcggatgcttcgcggcgtcctcgtccttcacgggcaggaacgtccccgccccgacgtgcagcgtcacctcctcgaatccgaagccgcgcgccttcatcccctcgatcagctccggggtaaagtgcagccccgccgtaggcgccgccaccgacccttcgaatttcgaatagacggtctggtagcgcgtatagtcgatctgctcgctctcacggttcaggtagggcgggatcggaatccggccgaggtactcgagcagctgtccgaaggtcatcgccgccgaccattcgaaacgcacggtgtgttcgcggccgcggttctctgcaatccatgcccgcagatgctccggacggccttcgtgctcgaaattgatctccacgtagccctccttccatttcttgaggttgcccacgatgcacgaccattggcaggttcccgtgacggcgaacgcccgctcatagtcggccgggtcgtggggctcgaggcagaaaacctcgatccgcgcccccgaaggcttgtgcatgatgatccgcgcccggatcaccttcgtgttgttgaataccagcagctggccagcgggcagcacgtcgcccatgtcggcgaaatgcgcctccgagatctccccgccacggtacacgagcagcttcgaagagctccgctccgcaagcgggaatttggcgatccgcccgtcgggcaggtcgtagtcgaatcggtttatgtcgatatgtcgttcaatcatgggcacaaatgtacgttttttttaaatcggacggacacctgcgcccgaaaaaccgcccttgcaaaacgacaggggccgtacgaaaataccgcacggcccctgccgaaacttatccaaacgcccgggctatccgtcctgccggccacccgggcaacgccccgaaggccgcacaggtacgccccgcatgtcccgccggaaacctccgggacactgcggcgggcacccgccgcgattattccaccacgacctcgtccacgaacaggaatcccttgctgccggcgcccgggtgccaggccgggatcgcagcggcattctgcgcgaccaccttcaggtaacgggccgacgtttcggggaactgcatccggtaacgcccgatgccgtcggcatccccggccttcgcttcgggcaccgagaccgaggccacctcggtaaaatccgtcccgttgtccgaaacccacaccgtaaccgacgagggcgggaatatccagtcgcccttctcggcgagcgtctccagctccaccgaccgataggactgctccccgcccatgtcgatggtcacgtcgagcggctcgtccagataccccagccaggcaccgctcgtaaaaaccgggcggctgtggtaaccgtcgaccagcagcgaagccccttcgaaggtatagctgtcgttgggcttggtattgagcaccgcagggcgccccgtcgacttgctgaatgcgaactcccgcgaataggaagcgttctcgccgccctcgcgcaatgccgtcgccctgaagcgggcgctcttgccgatctcgaccggccccgtgtaacgcgggctggcggccgtgggttccgagccgtcgagcgtatagtggatcggagcgtcgccctgcgtggtgagggtcatcaccacggcgcccttctgcgggtctacggcatacgatcccttgatgccgaagatatgcttggcgaatacgtaccccatctgcgaatagatcctgtccatgcggaacccgtcgcggaagcgcacccagtccttcaccccgggctggcaccactgcacctcgctcagcgccgccagacggggcagaagcatgtactccaggtggtcgtcagaagcgatgtactccgtccagaggtttgcctgcacgccgaggatatgcgcctgctgctcgggtgtcagatcggccatcgggtcgaacgaatagactttgtcgatggtcacgcagcccccgattccgaagggttcggcatcggcgtcgggcgactggtagtagtcgaaatagaaatgcgaattgggagtcatgatcacgtcgtggccgagcttcgcggccttgatgccgcccgcgctgccgcgccacgacatgacgatggcgtccgacggcgcctgtccttcgagtatctcgtcccaaccgatgatgcgccggccgcgttcggccaggtatttcccgatgcggtcggtcacgtacccctgcaggtagtgttcggccgtatagccgtccttgtccctgagccccagctggcgaatacgcgcctggcagcgggggcacttctcccagcgcaccttcgggcactcgtcgccgccgatatggatcagctccgacgggaacaggccgaccacctcgtccagcacgtcctccaggaattcgaaagtcttctcctgcccggggcacagcacgtcgtcggccacgccccaacgaccccagacctcgtacgggccgcccgtacaccccaactcggggtaggcggtcagcgccgaaagcatatggcccggcaggtctatctcggggatcaccgtaatggcgcggtcggccgcatacgccacgatgtcgcggatctcgtcctgcgtataataaccgccgtagggcgtattgtcgtagttgtcccactccttgcggatcatggttttcttgcggatgctgcccacggtcgtcagctcggggtactttttgatctcgatgcgccacccctggtcgtcggtcaggtgccagtggaagcggttgagcttgtggatcgacatcacgtcgaagtagcgtttcacctcttcgaccgaaaagaaatggcgcgccacgtcgaggtgcatgccccggtaagcgaaacgcggggcatcctcgatgctcacacacggcagcacccactcctcgccgggcgcaggctccgtcccgtaaaccgccgcgggcagcatctgccgcaggctctgcacggcgtagaaaaagccggggaaacgcgacgcacggacttcgacgcccttcggggtgacatcgagccggtacccctcttccggcagcgtttggtcgaggacgaagcggatgcccgaggcgggaagctcgtcggcgacggtcacggggttctccccgccggaagttttcgccagctgcgcggcgaattccgccacggcgcgctgcgtccgctcgtcggcacggctgtcgcacacgacgccttcgcccttgacggcgaacgtcccgtgcccgggttcgaggtggttgggataaggtacgatcgagatttttggatcgtgggtggcgcaggcggacagacacacgcctgcggcaaaggccagtagcaattttttcatagaataatcagggttgtatcgtgacaaaagtaggaaaaaatccggatatggcccgctgcgcagggaaatatagccgacagaaacgggcatccacagcggatcgccctgtttttgcacaggtttttcccggcggaaggcccgattaccgggcattttttataactttgcgtcgcataattgctcacaaaactatgaaaaccgactttctggttatcggttccggcgcagcgggcctttcgttcgcgctcaaggccgcggcccacgggcatgtcacgatcgtcacgaagggcgaaatgaacgagtgcaataccaactttgcacaaggcggcatctgctcggtgacctacgcccccgacacattcgaaaaacatatccgcgacaccctggtctgcggagccggcaaatgcgacgaggcagccgtcgagctggtcgtgaaacgtgctccggagctgatccgcgacctgatcgaatggggcacacgcttcgacaaaacccccgacggccgattcgaactgaaccgcgagggcgggcataccgaacaccgcatcctccaccacgaagacctcacgggcgccgagatcgaacgggcgctggtcgagtcggttcgccggcaccccggcatcacggtgctggaacaccatttcgccatcgacctcctgacgcagcaccacctgggcgaattcgtcacgcgccatacgcgcgggctggcctgcttcggcgcctatgtgctcaacctcgccaccaacgagatcgagaccatgctcgccaagttcaccgtcgtcgccacgggcggctgcggcaatatctactccacgacctccaacccggtcgtcgccacgggcgacggcatcgccatgtgccaccgcgccaaggccatcaccgagaacatggagttcatccagttccaccccacgacgctctacaaccccggcgagaaacccaacttcctcatcacggaggccatgcggggtttcggagccatcctgcgcctgccttccggcgaggagttcatggacaaataccacccgatgaaatcgctggcgccgcgcgacgtggtggcccgcgccatctaccgcgaaatgaccaagcggggctcggacttcgtctacctcgacgtcacgcacaaagaccccggagccatccgcagccacttccccaacatctacgaaaaatgcctttcgatcggcatcgacatcacccgcgactggattcccgtgacgcccgcggcgcactactgctgcggcggggtgaaggtcgacaccaacggcgagacctcgatcaggcacctctacgcgctgggcgaaacctcctgcacggggctgcacggagccaaccgcctcgcttccaactcgctgatcgaagcggtggtctatgccgaccaggccgcacgccacgctgcgtcgctgctccccaaggtcgacatccaggagggcatccccgactgggacttcgaaggcacgcagcacaccgaggagatgctgatgatcatccagtccaagcgcgagatgcagaccatcctgtccaactacgtgggcatcgtccgctcgaacctctcgctcaaacgcgccatgcgccgcctcgagatactctggcaggagaccgaggagctctataacaagaccaagcccaaccgcgaattgtgcgagctgcgcaacatgatcgccgtggcctacctggtaatcaaacagggccgcgagatcaaggagtcggtcggctgtcactacaacgccgactacccgaacaaggaaaaggaagtatagataataaaggaactaaataacagcgccctgttccggcgttccgccggacagaagtccccgccgaggcggggatttaggggtggggcagacttgtaaacacggccaaaggccgcgacgacagcgcccggcagcacccctgcggtaactataaaagagacatttcaggttcatgacattacaggaagaaatcacacgccgccgcaccttcgcggtcatcgcccaccccgacgcgggtaaaaccaccctcaccgaaaagctgctgctcttcggcggggccatccacgtcgccggggcggtcaaaagcaacaagatcaagaaaggcgccacgtcggacttcatggagatcgagcgccagcgcggcatctcggtcgccacggccgtgatgggcttcgaatacaagggcaccaagatcaacatcctcgacaccccgggacacgaggacttcgccgaagacacctaccgcacgctgacggccgtcgattcggtcatcatcgtcatcgacggtgccaagggcgtcgagtcgcaaacccgcaaactgatggaggtgtgccgtatgcgttcgacgccggtgatcgtcttcatcaacaaactcgaccgcccctccaaggagcctttcgacctgctggacgaggtggaaaaggaactgcgcatccgcgtgcggccgctggccttccccatttcgaacggccccacgttccgcggggtctacaacctctacgaaaagaacctctcgcttttcacgtcggacgaaaaactcaccgccgacgcccagaccgccgagatttccgacctcgcgtcgccggagctggacagctacatcggcgcgaaattcgccgaacagctgcgctcggacgtggagctggtcgaaggtgtctacgacgagttcgaccgcgaggcctacctgcgcggcgagctggcccccgtgttcttcggctcggcgg

SEQ ID NO: 321 - DNA, 28145 bp, Alistipes onderdonkii
  source 1..28145: mol_type = genomic DNA
cgcagcgcatcctcgtgacgcgccccgaaatcaacggcaagaagctctcctcgctgcgcctgcgcaacaattacggcatcaacatcagccgcgtctaccgttcgggcgtgcaactgctggccacacccgacctgcgtttgcagatgggcgaccgcctgacggtcgtgggtgaagccgcagcgatcaagcatgtggaaaagatactcggcaacgccgtgaaaaacctcgaagagcccaacctcgtggcagtcttcgtcggcctgatcctcgggctcacgctcgggagcatccccgtaagcatcccgggcatcagcctgcccgtaaaactcggcctggcaggcggcccgatcatcgtcggcatcctgatcggcacgtttggcccgcgccttcacatgattacctacaccacgtacagcgccaacctgatgctccgggcactgggcctgtcgatgtacctcgcctgcctggggctcgaggcgggcacgcacttcttcgagaccgtcatgcgccccgaaggggcactatggctgctgctgggattcctgctgacgttcgtccccgtagtattgctgggtatcttcgcgctgcgcatcctgcgcatcgacttcgggtcggtcgcaggcatgctgtgcggcagcatggccaacccgatggcactgaactatgccaacgacacgatcgagggagacaacccgtcggtatcgtacgccacggtctaccctctctgcatgttcctgcgggtaattatcattcaggtgatgctgatgatttttctgtaacatccggtttggccggcacgtccggctccggcctctgatagcgcagcgcctcgatatcgcttcccgacggattctggaacacccgcaggtcgaactcggggatgacggccagcacatggtcgaagacatccgactggatgcgctcgtaatccacccacaccaccgtatccgtaaagaaatagagttccatcggcaatcccgtctccgtcggttgcagctggcgcaccatcagggtcatccccttgttgacaggcacctcatcgcgcaggtatcgttccagataggcacgaaacaccccgaggttggtctggtgcaggccgttgatcttgcgttcaccggggcggatgccatgcgcggcattgtattcctcgacccgctgctcggtctggtcgatatattcgcggatgatgtctatgttgcggtaccgggccagcatgtccggcgtacagaatttcacgctcgtcatgtccaggttcaccgaacgcttcacgcggcggccgcccgacgcctgcattccgcgccagttttggaacgaatcgctcaccagcaggtagggcggcagcgtaacgatcgtattgtcccagttctgcactttgacggtcgtgagcgacacctcgatcaccgaaccgtccgcaccgtatttgggtacggtgatccagtccccgaccttgagcatgtcgttcgccgaaagctggatgcccgagacgaagccgaggatgctgtcgcggaagaccagcatgatgacggccgccgaagcgcccagtccggtgagcagaatggcgggcgacttgccgatcaggatcgagacgatgaggataccgcagatcagcgctgcgattccctgcccggtctggcgcaatccgttgatcggtttgttctgccacgcaggacgcgccgagacgatattgaaggccgcataaagcagggcgttgataaaacggaagaccgtgacgacgatgtacacctgtatcagtcgtgtgacgatcgtcctggcttccgactgttcatcgaaaaccacggggaggacgatgaccagcacgatggcgctgacgatattacacagccggctcaacacggcggaactgaacagttcgtcatcccacgtggctttggtgcgcatcacgatgcgcctaatcccgcgcacgagcaccgtacggcacaggaaatcgagaagcacgacggacagcaccaccagggcgaaagccacccaacgatcccagccgttattcaatgcggaagtgagcccgagccatgcgagcagggcgtcggcccaacgtgtaaggagagactgcatacggtatttctatcaaatttcagacctaacggcctttgtaatcatcagcggcggaaaccccggcgacaggataacgactgcggaaggcaaaaatccggcgacagccatcaccatagaacatgcgtctgtggaacagcaccaatccctgcgcctcgcaccggtcagtgctggacaatgccctgcggcatacaggacagtcgcttcattgtcggtttccaggttacaatatacgaaaaaaaactataccccgagtacctgttccacctcgccctcgaaattgggcgtgaagacgcctttgccgagattttcaaagatttcgtcccggctccagaaacgcccgccgtcgagctcgtcgctcgggacgacctccccgtcgtacaccgtgcggtggacatagatcaattcgcgctcgcgctccgagcgaaacacgtacaccgccacgcgttcgggtacgaaacccgtcacaccgagttcttcgcgcacctcgcgccgcaatgcgtcgtccaccgtctcgccgtagtcgacatgcccgcccacggccgtatcccagcgcccgggctggatatccttccacacgggacgccgttgcaggtataactcgccccgcgaattgaacaggtgcaggtgcaccacgggatgcagcaacattccgccgccgtggcattgggcacgcgtcgccgcccccatcacgttcccggcttcgtcgaccaccggaaacagctccgcaccgttatcgcttcgcatggcggggatatttacggatataaaccacggccgccagcagccccaacagggtgaaacccgcaccgggcaacgccgtatattcgtagcccagcccgtgggcgatcggcaggcccccgcaataggcacccagagcattgcccaggttgaaagccacctgcacgagggctgcgccgagcatctcgccgccacgcgaattctccaggatcagcaactgctggggcgacgagacacagaacagacaacccgtacagagcgtcatcagcatgacggaaaggtaagggacatgtgccccgaagaaaatcccgagcagcgtcagggtggccgcggccagcgtaaaacgcacaaccttctcgggcgtaaaacggtcggagagatgcccgccgaggatattgcccgcgaacatgccgaaaccggccagcatgataatcagcgtaaggttctcctccgtaaaacccgaggtatggatcatcagcgggctgacatagctgtaccagcaaaagatcccgccgttgccgagcatcaccgacgccagcacgagccagggtgcaaggctgcgcaggaaccggaactgccctttcagccccgtatcgggcagcggctccatgcggggcacccacatccttacgagcgtcagcgccaccactccccatacggcgacgatcgcaaaggtcgtgcgccatgacagcacattgctgatataggtacccagcggcacgccgaacaggttggcgacggtcatgccgacgatcatgatcgaaacggcttccgtgcgcttccccgcatccgccacccgctctgcgacgatcgacccgacgccgaaaaaggcgccgtgcggcaggccggacacaaagcgcatcgccatcagcatccagtaattcggcgccagcgacgcgcacaggttcccgacggcgatcagggccgtgagcaccagcagtatctgtttgagcggacgcgtccgggctaccagcaccgtaagcggcgccccgaagcaaacgcccagggcataggccgaaataaggtgtccggcctcggggatggaaaccccgaggctgcgggcaatatcgggcaggatgcccatcatcacgaactccgacatccccagggcaagcgtcccgaatgccagtgcaatcagactttttttcatgtgtaaaaccaactgacgaataaccggctgcaaaaataacacaaaaggcgaaaagtttttcgcttttcgccttttgttacggtttccgtatggttgcatagaccgtccgcattcccggcagagagttccggcaccggtcattcggcctgcgacgcgggacgttgcggttcgcgcggctgccctacctcgtatcccagttcgcgcatccattcgacggtaagcgggtcgacctggtcgttgcgatccgcccagcggcgttgttcgatcaggcgtttcttatgctcctcgatgcgcatcatgatcgggaaatcgggatgacgcagccgcgtacgttccttccgctgcgaaggtcggatcctgcggtcgaacacatcggcctgcacgggccgccgcgccccctcccatttaaagcctttcaggtagagatcctgcgtgggcgggatatcgtccatcggatagaagttgtagaccggttcggttcggtaggtgatctgcaccacctgcttgtcctcgatatagaatgaacagtcgccgctctcgataacgcccatcatcgtgatctcgggcggctcgccgtcctgcatgtaatagatggtctgggcattgccgttgacgtcgttgcggtatatctggttgttgtagaaataggcggtcatagtcttgcccgccacctggttgtagtgtgtcgtatcgagctgactggccatcatcgggctgccggtgaattcggcacgtttgatctgctgccgctcggtgaaaatatccatcacgtccgaagtgatctggttgctctgattccacaacacggggtcgatatagaggtggatcgtcgagtcggtgctgatcgccacgatcgagtcgcacacggtctggaaatccgacctgaagatcctcacgtcgcggtaacctttcatcaggcggtagatgctgtcgcgcggcagggcgagcgagtcgaccgaatcggccggaagcgccatcgccgtcgtgtcggacaacagcgaatctgccagcaggttgagcagcgaatcctgttcggccatgttcatctcgatcagcgaatccagttcgcgcagggccgccgaatcgaccgggattacctttcccttgcgggcggcacgcgcctgccgggctttgagcttcgccgcagccttcagcctccgggcggccagacgcgcctcctcgcgctccttctgcaacagcagtttggccgtggtcttctccttgcgtctgacggctatcgaatcgagctgcgccttcttgattttggctgccgcggccttcttttcggccttggccttgcgcgccgcttccttgagcagggccttgcgctgggcaacggtcagcgtatctgcagccctgtccagcgagtcgggcaggctgcccggcgcggagagcgaatcggccatgtgcagcgaatccgcccccgacgaaccatgcgccggcgaatcggggcctaaagctgcggcgagcgaatccgtcccaccggccgacgaaagcgaatcggctgcactgccgggacgcagcccgggcacaatacgtccgccctcggggccggccgtgacggccaatccatcgggatgctgccccagcgaatcgggccgttgcagggaatcggcccccatacgcgcaagcgaatcggccgcggccttctcctcagcccggcgccgggcattctcattgaccgtaaagaggaacatcgagtcggcacgcatgaagagcgaatcgccctgtgtaaggtcgtagctcaccaccgagggtcgccgcgtgaggaatacatcgcccggttccttccaatactcgccgtaatcgccgaaggcgagtactttgtgctccgtatcgtcgatctggatgtcccgccacagcaccacgtggtctttggcgcggaaatagtcgatgctgtcgctccacatctcctgtttctcagtcagcacataaccgttgcgcgtaacccggtaaagcgtatcggccttgtcgtacgcgccccggtcggcatagaggtagtcgccgtccttgttccagatgttggtattctcgaagaaaaaagcgttgtcggtggccatgttgtagaccaccgagtcgcccttgagttcgtattcgtcgttacgcatctcgacgcggtctacgcaaacgagatccttggtgttggcataatagtagccgcgcaccgattcgagccggttgtcccggtttatcagcacgccaccgtcggcgaactggccgatattctccttcgtgttgaagacaaaccggtaggtatagagcgtggcatcgccgtcgacgaccttgacgatgtcggaatagacccgtgcctcgttcagctcgccgttgtattcggcgcggtcgccgtaaatataggtcgtattcttgttgatgaggacattgccgaagaactcgatccgcatgtccgaataacgcacggcactgtcgcacgtaatgacagcgccgttatgctgcgcggcgaaattgccgaccaggaagatcaccgagtcgccgggggctatggggcccatgttgtccgacttcaggtcgatgagtttcttctcgggctcgggctcctggccgggtgcctgcatcccgctgcgggcgaaaatcacactgcccgcagccagcacgacggcagctatggtaaagagcctgcgcacgatttatttcacccagcttttattctcgaactccccgtcgcggaattcggggtcgatgtaaacgtacatggcgtcgatcttcttggtcagccactccttgaacacccgctcctgcttggcattgagcgccatctcctccagccggaggtagtcttcgttgagcgatgcgacatgcgtgggaatgatctccacgagcttgacgatcttggccagctggttgcccatgatgtcctcggtcaggaatgcaggcgaaatctcgcccggtttgaggcggatcaaggcattgtagtcgtccagtgcaccgaagtgcgcgaaatcctcacgcaggaacttcgtcacggtgagcttcgcctcgaaggcattgaaacgctccagaatgtcgtggttcgagacgataccgccgttcatcttcgacgtggcgtcgtcggagaactggagggcggccttgtcgaacgagagggaatccttgcgtatctggttggcgatgctgtccaggaacacgaccccttcgttgagctcgtccatcgtatagaccgggcgcagcaggatatggcggaaatggtagaggctgccgcgcttgtcgagcaactggatgatatgctgtccgtagcgggtctcgacgacctccgatatctgccccggcttcatgttctcgagggcgtcggcgaacggtgcttccagtccgttgagctcggtgggatccatctcgccgccgcgcatcatcgtcccgggatcctgcgaatacatgcgtgccaggttctcgaatttcgccttgccggtaatgatccgttcgcgcatgtcgagcaggcgctcgcgcgtgcgctgcttggcctgcgtgatcgacttggggaaacgggtgatctgggcgtagacatactgttcggccacggtcggcaggctgtccttgtcgatcgacttgtagaaatgctcgacctcgccgggaatgaccgataccttgctcacgacctcgctctgcatggaagaggcatacgactgctcctcatagcgctggcgcatgttctcgcggatgctgaaaatggccatgtggtgcttggcctcgagtttggggatcgacccctcggtttcgatcatgttctgaatctgctgttccacatgcgtggcgatgtcgcccgcattgatcttcaccgagtcgatctgcgcctggttgaagagcagtttctgggtcatcagtgcctcgagcgcctcgttcatcggatcacggtcggaggtatatccttcggcacggcgctgggccgtgagctgccgggcatactccgccacttcggaatggaggatggacgaagaccctacgacggcgaccaccttgtcgagcatcacctgctgtttctgcgcgaacgccccggccccggcaacgagcagggcgaaagccgcccccagcataccttttttcaacattattctttttctttatcgtttgtattctcgttttcgaaaatctttatgctcccgccttcgcacgcacggttatagagttcctcctcgtggctgcggatgatctcgctctggcgctggttgaagaggatgcggcggatcgtcccccgcagccgttcgagcgggatgggctccccttcgcggcgcacggcgtcgatctggaaatagtagtgcgaatggctgtcgcgcatctcctgcacggccgtcgatgcgagcaccgggtcgtagttctgcgaccggagcgtaggcaggtaactcagaaattccgggaaatccacccactggtcgctgaaatcggagaccgtaaagtcgttcttcgcacatatgtcccggaaatcctgctgccgggcttcgctcttcgtccccatcagctcccgcaatttgcgcgcctggcggtacccttcgccgaactgcacgatccgccctttgaccaacgtacggtcgagccggaaatcggccttgtgggcgttgtaataggccgcgatctcgttctccgtgaaggtcgtgtcgatgctgcggtcgacgtaatgctgatccagcttgcggatcagcagcgcctgccggtactcctcgaccatcttgtcgatatcgtccgccgaggcggaaaaaaggatctcggcctcctgcaatttgagttgtttgcgcacccagcggtcgacatagaccttcatgaaggccgcgctgtcctcgcccgtaacccctttcggaactaccgacccgacatcacgcatcttcagttcgctgccgcccgcccgcgccagcgtggtatcgctggcaaaatagccgggcagttcctggcaaccgcccaggaacaatgtagccgccacgaccgctattttcgttcgcaaagtcataatccggaggacaaagatactgtttttactcgtaactaacgcagcctccgcccagattattacgccgcgccgcgatttttctcctcggccttcaggcggcgcagcgacacgagcatcatgtaacccgaaacggcgaagacagccagcgccgcaatataaaacagcacgtaaagcgtccggctgccgaccatgtcgatcagcatggaattaccgtgtccggcaatcagcgccaggtaggctatgccgttgttgattgcatggagtatgatcgcagaccagagcgaatcggtgcgcaggtagatgaaggccagcaccaggcccatgacaaaagcgttcaccaccaccgtgggatggacatgcacgatgccgaagatggccgacgagagcagccatgcggccaccacgccgtaccgcacgcgcgtcgattcgagcagtacgccgcggaagatcacctcttcgaaaagcggggccatcaccacgaccgtcacgatcgcccacgccccgcgcccgtagacgttcggcacctcgggcatcaggctcagcaacggctccagcacgaccgaggtcgagagcatgaagaacaccccccagagcaacagcacgggattcagcccgcgccgggagaaacgcgccacgaccgtggggccgtgccttcgcctgcggtagaagaggaatcccgcgagcgtcacggacatcgacacgaaataggtcatggcattgaaatgcccggcggcgatctgctccgccgtgcttatcgcctcgtcggggctggccagcagctccggatcgggccatttgcaccccgccagccatgccacggcagtccccaggccctgcgccagcaggaagatgccgaagaaaaccaggtagtccaccaccacggggaattttccgttgtagtgccatatcttattattgtcccccgcctttgcaggctcttcggcgggcacgggttcctgcacgggaaccccttgttttttttctgtcataacaggctgttactatcaattcgttccgagtccaaagatagtgcaagtcaagggcaaaagcaaatttatttgctccggcaggggcgcagcccatttcccgaaaagatcagcaaatttcggttacggttatggatttccattttaaatcattaaatttgcccgattataaacccgattgaaacatggcaaaggttatcgctttagcgaatcagaaaggcggcgtgggcaaaaccacaacggccatcaacctcgcggcatcgctggccctgctgggcaagaaggtgctgctgctcgacgccgacccgcaggccaacgccacctccggactgggcttcgacataaacctcgaaggcatctacgagtgtatcgccggcctcaggaagcccgaggaggttatcctgcaaagccccgacgtgaaaaacctgtggctgctgccgtcgtcgatagacctggtagcagccgacaccgagctgcccaagctggaggacgcccaccatgtgatgaagcgcatcgtggacgccgtgcgcgaaaggttcgactacattttcatcgactgctccccttcgctgggttacaccaccgtcaatatcctcacggccgccgacacggtgctcatccccgtgcagtgcgaatacctcgccctcgaagggctttcgaagctgttgaacaccatccgcaaggtcaagagcggcctcaatccggcgctcgacatcgagggtttcctgctgacgatgtatatgcgcaaccgcctgaacaaccaggtcgtgaacgaggtgcgcgaacatttcgggccgttggcttacgacacaataattcagcgcaatatccgtttgggagaagcaccctcgcacggaaagcccgtcatgctttacgacgcgggcgccgtcggctcggagaactatctcacgctggcccgggaattcctcaagcgcaaccgcaaaccgagaaaataacataccgaaatgaaacaaccgaagggattagggcgcggactggacgccatattcggcaccgacgccgtcgacgccaagctcaagccgatgagccagatgtccgagatcgacatcacggagatcattcccaaccccacgcagccgcgtacgcagttcgacgaggaggcgctcgacgaactggccgactcgatccgccagctgggggtcatccagcccatcacggtcaagaaatccggcaacgggaaatatatcatcatcagcggcgaacgccgctggcgtgcggcgcagcgcgccgacctgacgagcctcccggcctatatccgcgaggtggacgacgagaacctgcacgccatggccctcgtggagaatatccagcgccaggatctcaacgccatagagatcgcgctcggaatgcagcgcctgatcgacgagtgcaacctgacgcaggacgccctctcggaaaaggtgggcaagaaacgctcgaccatctcgaactacatgcggctgctcaagctgcccgacgaggtgcagctggcgctcaaggaggggctcatctcgatggggcacgccaaagccatcgccggcgcccccgacgggacgcaggtacgcgtgctcaaacgcatcatcaagaaaggcctttcggtacgccaggccgaggagctggtacgctcgctcaccgaacaaccggccgcagcggcacagaatgtggaggacgaggagtatcccgaaagctattcgcggctggtggagcaactcgaaaagttcttctcgcaggacatcagcatcaaacgctcgaagaacggcggcgggcgcatcgtcatcgggttcggcgacgacaaggatatcgaacagttcatcgaacggttttcgggacgtattaaataatatggtaagtatccggttcagacacctgctgccgatgctcgcagcgctcatgttgtggctccccgccgaggcacagctccaccgcgggggacgcaccatcgtacgcggcggcatgtttgtcaagccggattcgctgcgccacaagagcgattcgctggccaacaacgccctcacgcgcgaactcgactcgctcctgacactggacttcacggccgattcactcgccgtgacggcattgcgtacggacgacatccgcaccacggactcgctcatgcggctcaggctggccggcatcaagaccgaaccggattccatgcggcacaagaaaggctggctcatgagcgactcgatgtcgctctcgaaggtctgctggatctcgaccgtcctgcccggctacggacagatatacaacaaacaatactggaagctgcccatactctacggtacggtgggagcggggctggcgctctacatcaacgaaaacaggacatacaagccgctcaagcgggagtatgacgcctacaccgacaagaacctcacgcgtacgcccgaactggacgcactgcaggccaagatgatccgcagcaacacccgccgccaggtctacctgggactgaccgtcgcctcgtacatctatttcatcggcgatgcggcggtaaactactcgaccaacgacgtgtcgaatgtcaagaaggccacaacgctggcctgcatcttccccggcgcggggcagatctacaacaaaagctactggaaagtccccttcgtggtcggaggtttcgcggcgatgatctactgcatcgactggaacaaccgcggctaccagcgtttcaagaaggcgtacaggctgctgaacgagtacgaacagaaccccgacaaattccctgacgggcctaccgacgaattccacggccgctattcggcggattatatccgcaacctgcgcaacaacttccggcgcaaccgcgacctgtgcatcatcatctccgcaggcctgtacgtattacagatcgtcgatgcccacgtcgatgcccacctcaaggactacgacatctcggacgacctgacgatgaacctcgaaccgatggtcgactacacctacgtgccctcgctcggcggcaaccgcccggtattcggcttcaacatgagcatcaaattctaaccgatgagaaccctcctgaccatactgctgctactggcagtcgccgtcccagcctcggcactcgaccgccgcccccgcaaaaaagacaagaagaaaaacaagaccgaagccgtcgtaacacccccggccgcccccgtggccgagcagcaagccgcccccgagccggaggagcccgaacttcccgaccccgccgaggtgcagtacgacgacatgacgctcgggctcacggcagaacaggccgattcgctggtcgccgtgtggcgcgaacggcaatgcggggattcctaccaggaatttttcgacaactacatcctggtcgacagcacggccgaaagcacgacccccgattcggtctatatccagcggctgcgggcgctcgtctcgcccatccagctgccttacaacagcatcgtacggggttatatcaaccgctacaccgattcgcgctacggcacgatcagccgcattctgggcatgtcgcagtactatttcccgctcatcgaggacgaactgctcaaggaggagctccccgtcgaactgcgggcactgccgatcatcgaatcggcgctttccaccacggccgtgtcgccgatgggcgccgtaggcctgtggcagttcatgccttcgacgggcaaaagctacggactggaagtcaactcgctggtcgacgaacgccgcgaccctgtccgttcgacacaggccgcctgccgctacctgaaagacctctatgctatctataacgactggtcgctggccatcgccgcctacaactgcggcccgggcaacgtcaacaaggcaatagcccgctccggcggcaacgggcgcacattctgggacatctacgactacctgccccgcgaaacgcgcggctacgtccccgcattcatcggcgcctcgtacgcctatgcctaccaccgccagcacggcatcgaactcaccgaagccccgatcccgctggctacggataccatccgcatcgaccggctgatgcacctcgggcagatcgcctcgacgatcgacatcccgatcgagaccctgcggcagctcaacccgcaatacaaactcgatatcatcccggccacgaccaagccctatacgctcgtgctgccgcagcgcaacatcacgcaatacatcgccaacgaacctgcgatcttcgccaaagactcggcctacctcaaggagtacatcaacccggcgaacatcgacaagaaacgccaggaacgctcgggtacggtctacgtggtcaagaagggcgatacgctgggcgccatcgcccgccgctaccgcgtgaccacagcgcagctgatgcgctggaacggcatcaaaaacgcccataaactccgtctgggacagcgaatccgcatcgaaggaagataacatgatccgggatcacgataccatcgcagccccggcaaccgctgcaggaggggcattagccgtcatccgcatcagcggggaggaggcgttgcgcatctgcgaccgtatcttccgcggccgggaaccgctggccgcagcagcaggctacacggtacactacggggaaatcgtggacgacggccgcgtattggacgacgtgctggtcacggtattccgtgcaccccgctcctataccggcgaggatgccgccgagatatcctgccacggatcgcaatacatcgtttccgagatcctgcggctgctcaccgcctccggcgcccgcatggccgggccgggcgaattcaccatccgcgcctacctcgccggcaagttagacctctcgcaggccgaggccgtggccgacatcatcgcttcatcgtcgcgcgcggcccatgcgctcgccgcgaaccagatgcggggaggttattccgacgcgctggaaggactgtgcgaaaagctgctggaactcactgcgctcctcgaactggaactcgacttttcggaagaagaggtcgaattcgccgaccgcgcgcaactgcgggaggcgatgcagcggatcggggcgcatatcgacgccctgcgcaattcgttcacgcttgggaatgccatcaaggagggggtcgccgtagcgatcacgggagccccgaacgtcggcaagagcacactgctcaaccgcctgctcaacgaagagcgcgtcctggtttccgacatcgccggcacgacacgcgacgtcatcgaggagcggatcaacatcgacggggtcgtctttcggttcctcgacacggcgggcatccgcgcaacggacgaccggctggaacagatgggcatccagcgcacgatgtcgagcatcgagcgggcgcagatcgtgatttacatgaccgatgcggcacgccttgccgcaggtgcgcccgttgccccggaattcccgctccgtgccgaccagaaactgctggtgctggtaaataaaacggatacggcaccggactgccccctgcccgaaggcacgatcggcatttcggcccgcaacggcgacggcatagagagcctgcgccggatattacgctcctttgtggatacggaagccctctaccacggcgacgcaatcgtttcgaacaaccgccattatgaagccctcacggccgccggcgatgcgctccgccgggccctcgacgggctcaacagcggccttcagaccgacctgctgagcgaagaaatccgccaggtcatccaccatgtcggcagtgtcacgggacgcaattcgttagcctccgaagaagtgctaaagcacatattttcaaagcattgcatcgggaaatagaccgcgtttttcgagttaagcaaaagcggcatttctgcggcatacatccggcatacaaacagcaatattcgagcgttttacggttttcccaatcaaataaaattttcttttcggtttgctatccgaatgccgagaatttgttacttttgtgttgctattttgttactcggagcgaatgagtaacaaaagtaacagaatcttcaacgcaaaaggatatggcagaaatcaaggaaccgatccgaatcaggcgtaagaaactggcgaacgggaacgtcagtctttacctcgacatctacctgaacggaaaccgggagtatgagtttttgaagctctacctcattcccgaaaagacaaaggccgacaaggaggcgaacaaacagaccttgcagctcgccaactcgatcaaggcccggcgaatcgtcgagattcagaacggggagcacggcttcaagtcggcatacgccgaggatacgctcttcttcgactactaccgggccatgtgcgagaagcgtatcggcatggaaagcctcggcaactggggcaactggaaatcatgcctgaaacacctcgaaaagtacgagccgaaccagcggatcaagttctcgcagatcacgccggaatgggtgcaggggttcagggattatttggagaaagaggcgtgcgcgtggagctgcgacagcagggaacgggtcaaggatcaccccctgtcgcgcaattcaaaggtcagctacttcaacaagctgcgggcctgcctgaatcaagcctacgaggaacgcatcatcgcgcacaaccccatgcggggcatcgagggtttcaaagccgaggacgggacgcgcatgtatctgaccatcgacgaggtgcagaagctcgccaaggccgaatgcgaatacccggcgatcaaacgggcgttcctcttctcctgcctgacgggactgcggcgctccgatgtaatccggctgacatggggcgacgtgcataagcaggggcaattcacgcggatcatcttcaagcagaaaaagacgagcggacaggaatacctcgacatctcgccgcaggccgccgacctcatgggcgagcgcggcaaggacaccgagcatatcttccccgacatccactctccgagctgcaccaacaacgccataaagatatgggtgctgaaagccggaatccataaggacataacctttcattgcgcccgccatacattcgccgtgatgatgctcgacctcggaacggatatttacaccgtcagcaagctactcggccatcgggagctgtccacgacgcagatttacgccaaagtgctcgataagaacaagcaggcggcggtcgccaagatacccgacatattctaattgcggcgaaatcgccacaattaaaaaagaccatatcgagatcgtcctcggtatggtcttcgtctttattgctggaacatcatgcctttccccgtcaggagccacgtcgcggacacgccgcagtcccgaacgagcggcacgagccacccgacctcgaaatatccccgactgcggtctttgcgctgcgtatagaaatgaggaggagcaatcgaattatccctgcaatattcggctatgctctttatcaaccgattctgtacggcgatctcgaacgccgcgaagaaccgatccataatagccaacgtattatcgctataaacccgtctgcggctcatttcttcttcttgcccttgattagcgttttctcctccgatttgaggcgtcgctcgacctttttgacatcctctccggcggggagctgttcggggacgatacctcggctcaacagcatattgcggacggcgacattgttatctatatgctctttctctatcgccacctgaccgtgcaggttcttctgctccgcatttacggaggtcatctccgccgcaaaatcctttgccttgatacctatcgtcgggaggaagtcggccagcgggcggccatcgggagcgccgagtttgcgcttcaacaaagccgtatcgagatggaacagcgcccggtctcctttcgagcggataatagcgaagcctcggctatccaccccgcgctcatacaacacgccggagagacgcttctccgtttccgccagcttcgcgcgggcctgcacccgttcgtagtccgacaggcgtttctgcaccagctccgcgcggcgggtctgcacggcgaagtagttttgagcgaatgcgatctgcggcttgcggggatcgccgttctgcgcgatcaggtagcaggcatagcgggtcagcatataatcatcgacctcgcgctgcgctcctttggcaagctcgatcattttgctgacgtcggcaaaatgatcggcaacgggcatccccgccgcttcacacgcacttttcgccttatctatgatctgctcgaaattgcgccattgaacatatcccaagacggcgcacaattcccgtgcactccaacattccacgccgtcatagagacaaacgattgattcgaattgctcgaacaactcctttatttcctccgatttcatatccgccctattttatttacctttttctataatattgataagcctgtctatctgctcatcctttttttcgagcagcgcgatgaatttctccgaaatcgcgctcacctgattcccgttcccagccaccgcaataccgttgtcggaggctatcgcgttgccgctcccctcgtagaatgagcaaacacttttgttggtaacacgggctatctcctcgattagcccgctcttgacatcggaagtattcaacgcgctatgcaaacgctgattactcttatatccgagcattttagcgacatcagctatcgtgatgccctccgaccggagaatttccttgattttttgaccgtccatatatctgcctatatatcaatcatatatcttgaagcaaacatttttcttcaaaataaacaaagaaatatgttggtagcatcaagaaaagtgtttatctttgcccttgtaataagaaaagatattgccgcattaacaaatccgttgggcgcaaatatatgaaaatagtacctaataagtgaataattaaggaaaaattatgagccgagcagaaaataagtcgcttttcgatctctacgccgagcagaaaaagaagcctacgcccgcacagattttcgtctccgaactcgctgcactcacgcatcgttccgagaatacggtcaagatgtggctctgcggtcggcaagtccccgacgagctgacgcagagtatcatcgcccgtcgctacaacctgaatataaccggcctctttccgagaacagaggcgcaatcccgcgagatatgaaagccttgttgaattggcgatactacgttctgacggtcgtcggtattatcgctgttatcgggacgttctccgtccttatcgacgaccagccattcggggcttggcttttcatcatggtagcctcaaaagtaatcgggttcggatcgtggtatctcatctttcggatgagcgaatattgggacgctcgcgggctgatccccgaaatgtcgaaaatgatgcaggaggaggacgagacatgggagtagaggaaagacttgaacgcatcgagcggctgcttctcatctcgtcgaaagaagcactcaacacttcggaggtcgccctgctgctcgacatatccgaaagccgcgtgcggcatctgacctgtgcaaagaagattccgcactacaagcaggggaacaaaatctatttcaagaaaaaggagatagaggcatggcagctccaatcccgcatacagaccaacgatgagatcaaaagccggggaacgacctatgccgtaacgcataaataacctgattatgaacgacaatcccaatattcacgaatccgagagccaatgcaggcgcatacttgcctacctgctgaacggcagccggattacaagcctcgaagcattgcggatgttcgggtgcatgaggctcgcatcgcgcatcagcgacctgcggaaaagccaccccgaaatcaaattcaaagcgacacgggtagaaacgacgacggggaaaaaggtcgcccagtattacatcgagagtattcaataaccattcaattcaacgcaaatgaaaacggtaatcattaaagaaatcagacttttgaatttcaagggtctccgagatttgacggtcgagttcgacgaccgcctcaccgaaatctacggcaagaacggcctcggcaagacctcgatcttcgacggcttcatctggctgctcttcggcaagaacagcgaggacagaaagcagttcggcatcaagacctacgacgcgaacggcaaaatcatcccgaagctcccgcatgaggtatcggccgttctgctggtcgatggcgaagtcgtaaccctctgccgccgcttcaccgagaaatggcagaaaaaacgcggatcggccgtcgaggagttcgttgggcacgaggaggaacgcctctacaacaacgtgccctgctccgtcaaggagtggaacgagaagatcgcggctatttgccccgaacaggtattcaaattcatcaccaacccccgctacttcacggcacagagcgtcgatacgcagcgggcgatgctgttccgcatggctggcggaatctccgacgaggatatagcggcagggaatgccgattttgcggccctccttgcctctctcacgggcaagacgatggatgaatacaagaaagagatcgccgcgaagaaacgccgtctgaaaaccgaaatcgaggccatccccgaacgtatcgacgagcgcaagcgcgatgtgccggcagcggaggattgggcggccctcgaaacggaactcaaagccaagcaggaatcgctcgcgcaggtcgaggcacagctcgcggatgcggcaaaagcctacgccgccgcgaatgatgcccgacttgccgatgtccgcaagatcggcaatctgaaaaccgaacgtctgaacctcgaactcaaaatcaagaacgaggtacaggccctctatcgctccgacaaagccaagcagcgggctgccgccgaggatttggatcgggcaaagcgcagcaaagaggctgttgagcgcgaccttgcctccgcccgcgcagagctggaatcctgcaccaaacgccgcgcggaactcatcgaacaatggcagtctatcaatggccggaggctggtattcgacgagaacgaatttatctgtccgacctgcaagcgtcggttcgagatcgaggagatcgagagccgccagcaggaaatcaccgagaatttcaaccgccgcaatgccgccgacctcgaagagaacaaccgccggggcaaggagaacaagctccgcatggaggaggtgcagaggcacatcgcagattgcgaagcccgcatcgccaaacagggaaaaatcatcgccgaaatcgaagcgagcggcatcctcacggcaaacctcatcgagccggacgcaacccccaccattgaggcaaatgccgagtatattgccatcggcaagcagatcgccgaactcgaaaaatccgtcgagcaacccgtatcggcctcggaggacgaactgctccgcgacgggcgcaactcgctcatcgagggtatcgacagcctcaaaaagcggctgatgaagcgcgaggagatcgagcgcaacaaccagcgcatcgccgaactcgaaaaagccctcaaagcccaatcggaagaactcgcccagttggagggtgtcgaatttacgatgacggcattctcgaaagctcgcgcggaggccatcgagggcaaggtaaacgggcttttcgacttcgtgaaattccggctgttcgagacgcagatcaatggctgcgaggtcgaaacctgcgaagctatggtgaacggcgttccgttctccgacgccaataccgcaggtcagttcaacgcaggcatcgacatcatcaatgcgatatgccgtttcgagggcatttccgccccgatcttcgccgatggctcggaaagcgtgaataccctgcatccgacgcaatcgcaggtcgttaggctgttcgtatcgcacgacgacaaactcatcatcaagcatcagggaaatacggctccgcagagccttttcagttaataatcattcacttttaattcaacgcaatcatgaaaaacgaagaacagaaaagcgcattcatcctccgcgtggaggagatcgaacacgaactcgaaacgctggtaaatgacaagggggggggaagtgagaagtcctgcattctcctcgtaaacgagacgccgaaagatggcacgacgacggcccaatgcgtcgctatcatcgggagcggtcgagggatggtgaaaagcatggccgcgttcctttccgactccgaaatgatgccgatagccgaactcggagcgaagctcgccgcccttgaaaaactcgcaaaacattaacattcaaactctattcataatggcagacaaccaaatagccccggctcaatcacagcaagccgtagcacggcaggaaaaacctatcgacctgctgaaagcaacgatcaacgcgccgtccgtacaggcgcaattcaagaacgcactcggcgaccacaaggatacgttcgtcgcatcgctgatcgacctctatacgggcgacaaatcattgcagacctgcaaaccgcagctcgtcatcgcggaagctctccgcgccgcaaccctgcggcttcctctgaacaaagccctcggcttcgcctacatcgtggtctataataacaacataaagcgcaaggatgccaacggtaacgacatcatcaacccaagcacccacaaaccgatctacgataagattccgacgccgacattcatccccggctacaagggctatatccagctcgccatgcggacgggccagtatcgaacgatcaatgccgatgtcgtctatgagggcgaagtccgcaaggtaaacaagctcacgggagagatcgctttcgacggcgaaaagacctccgacaagatcatcggctacttctgctatttcgagctgctgaacggcttctcaaagacgctctatgtaaccgtcgaggatatggcggcctacgcaaagcgatactccccctccgtgaagtatgaaaccaccgtcgcccagctcatcgccaaagccaacgacggcatcatcggcaagaaagtcggatgggagggcaacttcaacgacatggcgatcaaaaccgtcgtccgccgcctgctgtcgaaatacggctacctctccgtcgagatgcagaacgccatcgcccgcgatgccgaagatgaggccatgtcgaaccgcaacgaaacactcggcagcgccaatgcgcaggccgtcgatttggccgccgccgaatacgaggaagtcgatacggagacaggcgaaatcaaaggaggcggcgaagaacaaccggcccctgcacctgaatactgatccaacaacgcgggagtatgattctgaaatgtttagggagttcttcacagggcaactgctacctcttggaagcggccgatgagaccttgattgtcgaggcgggcattccgatccgcgacatcaaaaagggcctcggctggcagctcggcaaagtcgtaggatgcctcatttcccaccgacacgaagatcatgcgaagtcgttgaaagacattctcgcctacggcatccgcgtccttgctctctcggatgtgttcgatgccggaggtttgagaactcgcgtattctgcaaggaaatcgaaccgatgcacggctacaaagtgggaggcttcaaagtcttcgtgcttccagtcgtccacgatgtgccgtgcgccgggttcgttatcgagcatcaggaaatgggacgcctgcttttcataaccgatacgatgatgtttgaatatcggctgccgaacctgaaccatgtgatgatcgaggcgaattactccgatgcgatcttacagcagaatatagaccggggtttcatgccgccctctatgcgcagtcggttattcagctcgcacatggaacttgaaacgacgaaagaggtattgcggacgaccgacctatcggaggcaaacgaggtgattttactgcatctctccgacgggaatagcaatgcccaagcgttcgccgaggaagcgcgggaaaccgcaggaaaacccgcttatatcgcctgcgccgggttggaggtcaatatcgacaaaataccgtactgatatgcgccccgtaccgaattacatcctctcaacgcttctgcgtcatctgccgctgatactcgaaaacgtgcagatcgacagaggcaatacacggctcatcaacgccataagattgataaaacggattattccacgattacagaaaattgaaaatgaaaaaaataccaaaccctaacgggaacaaattcgtcttgccaaagggatataccgacctcggatggcaattcgacttcaatgctcccgaattaaaaaaatgcagggaagccgggcatatccggcggaagttcgataattcccaatacctgtatcggtgtaatgatgtggtatatatctgcgatcaatgcaaaaatgtataccacgtcgatatgagcgattaaagaaatcgaatgcgatgctgatagtaaagcaagacaagacccgaaaggaggaagaggggcagatattcgtcgaactcacgtcccaccgtgatattatgaatatcgcagattgcaaccgcctcggctattggtgcgacaaagcgcatctatcgcacttcatcatagaatgcgcaacatgtttcacgcaagaagaactaaaaaacatactgaaaatgaacggcaacaacatttttatcaagaaaaacaacctgctcgatgcctacaagaacggcaatgcagacaacaaaaagatgctcgaaaatctcttcggcaaggagatgttccgcccaaaaaacatcatggagagcgtaaagacctttgaggatgcttgccacgaattaggcgatgcgaaaaatcggctggtttgggagtatttacgattcaaggacagcgatgtggcaactgacgacattcttgcctatctcaaactccgcatcatcaccgcagctctcaatgagggttggacgccgcagttcaccgaggacgaataccgctactttccgtggttttggctctacaccaaggaggagatcgccaatatggacgaggaggagcgcaagaaagttgtcctcttcggcggtgatgcgaattacggctcgtatgccgggttttcgtttgcgtattcgtttaacgcgccctcgtttacgaatgcggatatcgggtctcgcctttgcttcaaatcgtctgcgctggcgaaatacgccggagaacaattcgctgaaatttaccttgctttcatagggaaataggtgatgggaggatggataaaaatatatcaaaccattcgggagcattggatttgggaacggcctcgctatttgaagtggtggatcgacctgctgatgctcgccgaatgggaagataaaaagaaaagttttggttcgacggtattcgtaatcaaacgagggcagttagcggcatccgtatcctatctccgtaaaaggtgggaatacatcgacgataacgaagccaaaaggacgccgtccccccgaacgattctcaactttttatctatgctcgaagaagatgggatgattgtcaaggatacgaatgtattgccgaataggataacactcataacgatatgcaactacaataattatcaaggtgatcctatatcgggtgatgccgaccatgataacaccctcgataataccgacgataccgccagcgatactacccgcgatactgaatataagaataataagaatataaaagacaatagagaggggaaaagtggaaaaagcgaaaaacgcttttccccgccctctattgaggaggttgattcttatatccgagaaaagggctatacggtggatgccgagcggttcgtgaatttctacgaaagcaaagggtggtatgtcggaaaaaacaaaatgaaaaactggcacgcggcggtcgccacatggcagaaaggagatgacaagcgaaatggtaacaatcaacaaagatcagatgataaacgtcgagggattgaagcgacagctactcgcccggaagacttcgagggatcgttttagatgggaactcacgccgaagcaggcggaggacattcttctcgcatcctatcagtcggaggtcgaatatcggcatcgcaggttcatcgccgacgtggaaaccaaagccaacatcgagcatatcgccaaatttctgacaagcgacaacgccaaattcgggatcatgctttgcggcgtaccgggcaacggtaaaacaaccctcttgtatgcgttccaagctgcgaccaactggctcaacgacatcgggcatttcaaggtgcggaaaggcattcggatcatcgacgcaaaagagatcgcccagctcgccaaagattacgccagcttttgcaatctgcgcaatatgccgatgatcgccatcgaagacatgggccgcgagccgaccgaagttctcgactacggcaatgtcatgaaccccgtgatagacttgatcgaataccgctacaatttgcagctcttcacgttcatcacgaccaacctcacaaagtctcaaatccgagagaaatacggcaaccgcatcgccgaccgattcaacgagatgttggaagtcataatcttcaagaatgagacctatcgcaaataattcgtttttctgcgatttaccgcagtgttatcgcgcaggcgataagttggccggagaatccgaataaatgcgtcagatcgcaggaaacatagcaaagacacaaaattcaacgcaatgggaacagaagtcaaattaaaacgcgaggctatcgagcaacgcatcgccggaaaggtcagcccaccggcttcaaggaatcgctcgatggcgggcgcaagaagcacaccatccgaggcaactacgaccaatggcaggccatcgccgagaagatgcagaggggcggatattgcctctcgatccgccaatggtcgggccgcccctataattccccgcaggtagagattgcccgcctcgaccatcctatcggcatccagcggatagaattgcattaccatagcgagaacgacacgatcaccgccaagatcgacgggcgggaatggcttgatgcggactgctatgagatcgccaaaaacgacggcctcaatacgaccgacttcaaggagtggttcttcggcaaacgcccgaaagaggacaaggtctttcacggcgtaatcgttcatttcacagattttcggtactgattatgaaacacattggaatagcccttatctacatcggctttttcgccctgataggcttcgcgttatggatgacaaagaatctcgcggtattgtttttcctcattttaactcccgattatccagcacacgactgatatgcgacatcaagaaagtatcattcagcagacctgcgtccgttggtttcggatgcaatacccgcagctcgctatgcttctcttcgccgtcccgaacggaggcgcacggcttcgatccgaggcggccatcatgaaagccgagggaacgatgaaaggcgttgccgatctcctgctcctatttccggcaaagaaatttcacggcctctgtatcgagatgaagaccccgaaaggcaggcaacagccatcgcaaaaggcatggcaggagcgggccgaatgggcgggatacaagtatgtcatttgccgctctttcgacgagttcatgtccgaaatcaacgcctatttgaagtaatgctcttttttttgtctaaataaatacctaataggtacttattttatacctttgtggtatctatcttaaaaaatgactgctatgagtaaagagaacaagcccctgaaagctatcgcggccgatttcgtctctatcgggatggatatgctggaactcaacgaggggcagcttgacgggcttcctgcgaatccccgcgagatattggaatccaagctcgacctcctgaaaaaagacattcaggcgtaccccgaactgatgaactaccgaatgctgttggtctatcccctcgacaatggcaagtatatcatcatcggcggaaacatgcgctatcgcgcactcgtcgaactcggattcaaggacgccccgtgcgtcatcattccaaaagagacctccatcgagaagctgaaagcctacacgatcctcgataactccggcttcggtaagtgggagtggtcgatgctcgccaacgaatgggattccgacgctttggccgcatggggtctcgacctgccgatggatgagagcgagatcaacgtggatgatttcttcgacaagctcgaaaacgcggcggagaaagacaagggcgaaaagatcaccgtctccatccccgacgaacactccgaccaaaaggaggaaatcaagtcgctcatcgaacaggtactcgcagatcgctacgagggcatcaagatcaagtgatgaaaatccacctcgcgggcaacaacccatatccgggcgtcatattcattcggctgtatgtaaatcagatcataagacgcctcggtaacgcacagaggggggggg

SEQ ID NO: 322 - DNA, 19044 bp, Alistipes onderdonkii
  source 1..19044: mol_type = genomic DNA
tccggcgggaaggtctttgagtacaaactcaccattgacatcggtcgaagtgccgagtgtcgggctgtctttcacgatcacggtcgccccgattaccggggtgtcgttctcgtcgacaacggtacccctgaccgttctggtctgggccgacgctgccgccatgaagaagactgccatcagcgataggaggatctttcgtctcataggcaataattattaattaaaggattaagtatgggggcctttgcaggccgggtttgaaaacgagcaaacattccctgtacggagacgggagcgagttccgtgtacggttcgcggggattgtagcgtgccggaaaggttgctggcggcggtttgccgtggcaaacggattttccgggagccgcaaattacgggatcgcctgtgtgggcaggtttccgtaagcagacattcgtagagttgatggagggtgccgaatccggggcaatgaaccgtccgggtgtttgcgaagcaggatagtcggcagttcgactgtggctgttgaataccggaggattcggcgtggcggagagtgttccccttttattgcctttatattaaaggtcccttatatacaaggttgtttccggcgaaaatacggaaggcggcctgtgccgccggacaaatctggcacttaatcactttccgcgaatctcccgtgcggagcggcaacgagtagaaatttttcatggcttccagatttttgatgggtgttctgtcctgccggtaaatttttagtatatccggttatacaaaattatgtttttgtatcctttgtggagtatgaattcatctgaaaatagtatgattatatatcggaaatgcggttgttatgccctgatttattgccgatttgctttcttttccctatttttacatggaaacggagtatgtttttatctaaccgtcttatgcacctgaggtatctgttgctggtcgccgtgtgcgtcgcggtaccggcgttgtcccagaatatttgccgtatctcgcaccgcgaggggttttcgaattgttccatcctctcgcttgcgcaggatgcggacggatatgtctgggccgggagttgtgacggactgaacctttgggacgggcattatgcccggaacttccggctttccggtaacctggtgcaggagatcgtcgctacggacgacggctacctgtgggtgcgcaccaactatggggtcgaccgggtcgatgcacgggcccgaaccgccgaactgcatgccgacttcccgcgtgtttaccaatatacggcacggagccgtgacgaggcgttcttcctgtataaagggcgtttgtacgggtatgtcgcctccgagtcgcgtttcgaaccgctctgcggagtcgatgccgacgatgtattgcgcatttgcctcgacccggacggggtgctctggttcgtgcggcgcgacggcatggactgcgctccggtagtttatgacgccgaggggcgtgcggtgctgggggcgtggaaacacattccggtgcgcaacggtatttcgttcgtccgctatgacggtgaccgcacggtctatttcgtcgacggtgcgggccgcctctgccgtttcgataccgagcggcagttgacgtcggccatctgcgggctcgcgcaggagctggaacggcgcggggagcttgcggccgttatccgcgacggggacgactatgtattggcgttcgaaatgggcggggtgttgcgcctccatgcttccgggtcggaatccgggggctatacgctgcgggagatagatgtcgcttgcggcgttttctcgctgctcaaggatcggaaccaggatatcgtatggatcgggacggacggcagcggcctgctccgccagtcggccggggatatcgcggtacgctccataacctatgacatgctgccttacaagcttaccaaaccgatcaaggcgctgttcgtcgacgagcgcggcaacctgtgggtcgggacgaagaacgacgggatcctgtgcatccgcgatttctatgcacagcgagcgttcggacgggaaaatacccggaattttatagccgagaataccgccctgcgtaagaattcagtctatgcctttgccgcgagccggctgggtgtgctgtggatcgggggcgacggcggggtgtgcttttattcctacggcgacggacgcatccatgccctggcgggctgtgagcagttggcgaatgtacacggcttgcatgaggatgctgccggggtgctgtgggcggcaacgatcggtagcggagtataccgcatcgagcttgcaggccgtgcaggcgcccccgttgcccggctggccgagtccgtggatctggggagccgggagcggagccggaatttctttttctcgttctgcgaggagtccgattcgacgttgtggttctgcaaccacggcatcggggcggtgcgataccataaatacgcacgccggggcgaggtgatcccgctggacggacgccgtgggttggccgcgaacgacgtgacggtcgccgtgcgctgttccgacgggacgctctggttcggaacggggtgcggcatggggtgttaccgccccggggaaggggcggttgccgtcgagttcgcccacgaccagttgcaggccggggtgattcacggactgctggccgattcgctcgacaatgtctgggccgccacgaatgccgggattgtccgctataatccggctgcgcaccgttcggtggcctatggcgcttcgtacgggctggaggtcgtggagttcagcgacggtgcttatttttacgaccgccgtgccgggaagctgctgttcggcggcatcaacggtttggtcgtggtctcgggcggcgagtcgctgcaccgggggtatatgcccccggtgcggtttcgggatgtgaccatcgacggcacggatcacagcatttcgaagctgatgcgcaagggcaaactggtgcttacccaccggcaaggggctttcggcctttcgatcgtggcgctggactatatcaacggcggcaactattcgtacctgtataacctcgaggggttcgacagccagtggaatgacaaccgccataacaaccggctgcttttcgccaaccttccgcccggcaattattcgctcaacgtccgctaccggaacaatatgaccggggagctgagtcccgtaggccggctggcgatccgggtgttgccgccgccctatgcttccgcttgggcatgggtggtgtatggtacggccgcgtgtgtgtttgttgcgttcacggggcgctatctggagcgccgccgccgtgaacgcatgcacaggcggcaggcgctttacgaccagcactccaaagagctgctctacgagtcgcgtatccgttcgtttgccagcctgaccaacgaactttcggtgccgctgacgcttatcaacggttcctgccagcagatcctggagtgcggggcctccgacggcttcgtgctccggcaggtgggattcattcatcgcaatgccctgaaattgaaagatctgacctgtttgcttaatgagctcagggcggccggggcggcggatcgtcccaacgacgtcgagctgctcgatgtcacccggatgtgcaacggactggtgcagacttttgccgagtatgccgaaacacacaaggtaggctaccgtaccgaggtgggggaaggtatgctcttcccctcggcgcgcggtacgttgagcatggtgctgaatatcgtgctgtccaatgccttccggcgctcggagacgggcggggaggttttcttcggtgtatccgttgtacaggataggctgcgggtcgtggtttccaatcgtggggagggcgtagacctggggcagatcgagttcctctccgaccgttaccggctgctggactatctggaaagccgcggtaagggcggcctttcgcagaaaggggatatggagctggcgatctgccacaacctggcagcgaagctgggcggggagttccggatcgcatcggaaggcgacgttacgactgtcacgttgtcgtttcccgaactggagatcgcccgggtaacgcagccagtcctgcaggtggacatggcttccgaccggcagttcgggatgcccggcgccccggctgtttccgccgtaacctcccgcgatgcgttgccgacgatgctcgtggtgtgcgaagaccccgacatggcttcgttcctcgcgcaactcttcgccggcgcctatgaccttaaggtcatgggagagctcgggcaggctgcggagcaactggcagcgttgcggccacaggtcgtcatttgcagtgcggtgacgctcgatccggccatgaccggtgtgatccggcatatccgcaggagcaggcacatggcacaggtgccggtcatcctgctgacgtcggcctcgcgttccgggatgaagatcgagggactggagtcggaggtggacatctgcctggccttccccttcgacatcgcgcacctgagaaacgtcgtggggcagttgctgcgccgttatgaatcgctgaaggattacggccgttcggcatacagcgcgttcgacctggcgcaggggcacctgctccacaaggaagacaaggttttcctggacaggatgctcgagatcatccacggcaatatcctcgacacgtcgctttccacacagttcatcgcagaccggatggggatgagcctgcccaacttctatcgcaggctggggggcgtgaccgatcgaaccccggcctgcatcatccgggaataccggctcggtctggctgaacagctgctggtgaccacccggctgtcgatcgacgagatcatttacaaatcgggtttctcgaatcgcagtactttcttccgggggttcgtgctccgtttcggatgtacgccgaaggtgtaccgcgaacagaaagtcagtgaggcgatggaaacggatgcagggccgggcacagaggcgggagtggaagccgagacaacctgaggtggctgttcatcctgccggccgcgcgtttcgcggcggagcggggccgcgcttttttgttattcggcccgaaatcgctatatttgcctctggagtttccgtgtacggttcgtccgagcgggaacgatggtcattttttaacgatatcaacatgaaaattgcgattgtgggcgccagcggggctgtgggccaggaatttttgaaaattttggaggaacgcgacctggggatcgactccctgttgctgttcggttcggaacgcagtgcgggacggacgtacaaattccgcggagaagatattaccgtcaagctgttgcagcacaacgacgatttcaagggggtggatttcgccctgacgtcggccggtgccgggacatcgcgcgagtttgcggagacgatcacccggcacggagccattatgatcgacaattcgagcgccttccgcatggatgccgacgtgcccctggtggtgcccgaggtcaatcccggcgatgcgaaggacgctccgcgccgcattatcgccaaccccaactgcacgacgatccagatggtcgtagcgctgaaggcgatcgaggatctctcgcacatccgccgcgtacacgtttcgacctaccagtcggccagcggggcgggcgccgcggcgatggacgaactggtcgcgcagtatgccgagctgggggccggcaagcagccgacggtcagcaagttcgcattccagctggcctacaacgtaattccccatatcgacgtgttcaccgataacgactacacgaaggaggagatgaagatgtttcacgagacgcgcaagatcatgcattcggacatcgccgtgtcggcgacgtgcgtgcgcgtgccggtgatgcgtgcccattcggagagcatatggctcgagacggagcgtcccgtgtcggtcgccgaagcccgcgaggctttctccagggcacagggcgtggtgctgatggacgacccggcgggcaaagtttacccgatgccgctgtttatcgccggcaaggagccggtatacgtggggcgtatccgcaaagacctgacttgcgagaatggcctgacgttctggtgcgtcagcgatcagatcaaaaaaggggcggcgctcaatgccgtgcagatattggagacactggtctgatggccggaaatttaaaaaacaggaaaaggggagactgcgggtctcccttttttttatacctttgttcccggcgtaaagttcgtgccctatggaatccaagttttcagcccgtatcgctgagttgcccggcccggtgtgggtgttcggggcttatgtcgtttcccggctgggggagtgggcgttcgggctgctcatgcagttcgtttcgggctcgtggccgctgggcggcggcacggctttgatgttcctgatccctgcggccggcgtggcgctgcccgtctgcgtgctgtggggcttggtcggccggagcccctacgggttgtcgctggcgcgctggtatgccgggctgcgtgtggtgttgcatttcgctgcgctgctcatgctgctcttttccggatacgatccgcatctgtacggagggaccgaaatgtttatccggggcattgcccggaatgtcgtatatggtgccttgtggttcctcttcctgctttatctggagcgctcccgtgcgctggatgccgcgatgtccggggagcgctgcgacctgcctctgtggtgcgttgccctgatggtcgtggtgttggcgctggcgatgtagggcgtgctgccggagcccttggcacgggcgtgtgcattttattctgcaggcgatcggagacggctcgtttccgggtcttcgtatggcacattttgggcctgaagttagcgaattagaattttttattgtaatttagggtcgcgacagtcccgaaaaagaggtgccgaagttgtatttttcgaatatattcactatatttgtgatacatactgactaacacggaaagtgtaagtttattctcgagtggtaaatcttgcaaattaatactgagaagagaataagccggcatttctccgcgtcttatccgtttacggatataggcgtgggactgttgcttattttattctcgaggttttgcaagaaccttcccactctgaaatatagctacagcaccacgctttccttttttttaattttacatttattgcttagttcccaggtgcgggggactgtaggagctatgtcccatcataaagcatgcgattcctaacccttttaatctcagctatatttatgaaaaactgtttcaaaaccgttttggccgctgtggccgtgcttgtttggctgggcgcctctgcccaggacgatccttcgaaggagactgtcatcatcaatccttttacgcacacctccgctgtcagccaggcagcctgtgacaacatccgggcggccgtcctgtcgggttttgccgaccgtggccgtttccacatcgtcgacgcactgaccgacgatacgctgtcgaaactctatgccgaccgcaacgtcgaggacgtggtgaacgatgccaactggaagagcgaaagcgaagccgcctacaaggcgttgggcgccaagaaggtcgtcatcggacaggccaacaacgtttcgttctcgcagttcaagtcggatatcgacggcaagatgtacaacaaggccgaggtgacctattcgctgaaggtatataacattgccgacggcgccatgatcggttcggaagacctttcggtttcgggtatcgacgccgattcgaaggacggtgcattcaacgacgcgatgaaagacctccgcaagggcatggtcgggttcgtggacaagcatttcaagttcgagacctatatcctcgagctgggcgaggccgacaagaaaggccgcgtcaaggagctctatatctcgggcggtacggagatgggcgttgccaaaaagacccgtttcaaggtattcctggagcgtaagatcggcccgaaggtaaccaagtcggagatcggcaccatcgtggccgtcgaggtgatggaaggcgttaccaaatgccaggtcgcttcgggcgaggacgccatcaaggagaaattcaacaacggcgacaagctggtcgtcatcctcgacaagcaggggacggcggcgggcggtttcttcaaagggctcgtcggtgcataaacttaccgcatataattcttctggaaacgatctccggggtgtcgccgacggtaccccggggattttatccgttcaaacttaaaataattatcagatgtttaggaagtccgtattgtcagtcatcgtcgtgctcctgtcggcgcttttccccgcctcggcacagaattatacgaccgatgccatcctgaaacgcacgaccggaaagatcgctacgctggagtgttcgggaatcgcccgcacgaagaaggaggcgatcgagatggcgaagaaatcggtgatctacacttatttatataacggtatagacggcctgaacgacaacaaacccctgctgggcagcaaaccctcggccggggcggcccagtatgtcggacagttgctcggcacgacccgctatgccaattacatccgcagctgcaccatcgccgacaagaccaacaagaccgccgccaaggacatccaggtctttgctacgatcgacctctacaccgaatcgctcgagcgcgacctgatcaacaacggtgtcatcgggcgcaatgccgccgatatagcgctctccgaaacccaggagatgatcgccatgccgacggtgatggtcgtgcccttccgcaagagcggccagtcctacgaagaggccatccgcgacaattcggacatgcgcatggctatctcgaaggtcaacgaaggtttcatcaaacagggcgtggagaccaaagacctgctcacgtcgctcaataacgccaacacctatcaggtgcgcatgggcgacggcatgtcgctcgacgacgcgatcctcatcaactcgggtgccgacgtctcggtgagcgtcgatatcaaccaggatgtgaacgacggcggggtgcgcgtgtcgctgaccctgcaggcgatcgagatcgccacgggcaatacgctggccaccaaatccgaaatttcggggcgcaaacgcacgacggccgacgtgctgtgcggcgtgatggcgcaggcgatggtcggcgacttcatgaagcagatatccacacgcatggcgaccaagatttcgaccgggcagagcgtggccgtgcgctttacgatcgaccccggatcggccatcaacatggataccgagatcaacaacatcatgccgttgtcggacatcctcgtttcgtgggtgaagcgccatgccaagaacggcaagtaccatacgcagggccgcacgagcacgctgctggccttcagcgatatttttgtggacaactccatggaggacgggatgcagtcggacgtcaatgatttcgcgctggcgctctaccagtacctcaaggggctgaacctctccgtgtcgcgtacgatcacgggtaattccatcgacgtaatcatctactaaacaacagaccatgaatctgcttcgtaaactatcgttctcgctggtgttcgtgctggccgcgctgtcgctccgggcccaggccgtaatcgacctctcggcctatatcgacgacgagacggccgcgcagctcggtgacaacaacgccgcggccctcaaaaacaagatcagcaagatcatcacccgcaacggcatggccgatgccgcggggcttttcgtcgtcacgccgacgcttacgatcaccgacgacggggcggtcgatacggggatgaccacgctgcacgtgctgcgtgccgacctgaccctgtcggtcaaaaaccttttcgaagatactgttttcggaagccagaccatatcgctccaggccaacggcaaaagcatcgaagcctgtatgcggtcgctgatcaacaaggtgaacgtcaacgacgcgcgtttcgccaagctgatcggtgacgtgcagcagggcatcgccgactattatacgcgccagatgccgaagatactcgtcaaggtcaactcactcgtcgcccgtgaggagtacgaggatgcgatggcggcgctggccgtgattcccgagagtgtcgacgaatacgaggcggtcgaggagctcaaggtgcaggtctacgacaaactgctcgccggcgaggtgacccgtgccgttgcccaggccgatattctggtgcgccagggcgatatcgacggggcgctggagttgtgccgtgcgtgcaaccccgtgagcccgaactacggcgaggtgatccggttcctcaaccgcctcgatgcgcaggctgcggcggccgaagccgcggcgatggagcaggagttgcggaaaatggatgccgaggcaatgcgcgcgcggacgcagcaggaggctgccgtcgaggcgcagagcctcaaggccgagcgtgccgagtcctctgccaagaagggcaagtcgctgggtgaatggctcttcggactttgatcgaacgattgtctgactaatctggaaatacgatgaaaacctgtcctgtctgcggaaatagaatggaggattcgcagcacctatgcccagattgcggcgccgactacgtcgaggccgtcgtcaacgatattgcctccggtgcgggggcggattcccggctgatgctcgcgagcctcgaagaggggcttgccgggctggatgccgtgccgctgcccgccctgggcgatacggcccgtaagatgctccctgcgctgtgcgctgcggcgctagtattttgcctgctcgccggggtcgctacgggtgccaatatcttctacctgctggccgccgtcgcgctggtgccgctggtcgtgtcgctgcttgcccgtatgcaggggaaactgcggttgagtgccggcgaagtggtcgtaagggccgccgcgcgggtctttgccgaggatgccgcttccgtgcgggagcggtttggcggagatgccggggtgctggcccggctcgatgccatgcagctgcggctggatgacgcccttgcacggcagacgtcggcgcatgcgcaaaaccgccgcaaggtgacggtcattgcggccgtcgtgctgatttgctgcgctgcgggtgcaggggcgttggccgtgcgaaaccatgcggcccgcaaggcccaggccgcctatgcggcgcagcccgagtgggtcaggttgcgcgacagctacgccgacgcggccggcgacgacgaatatgcgggcaaagacctgcggatcgccgtcgtgcgtgccatgctcgctgacgggcagggcgctgcggccgaggattttttcttcgcccattgccagggcaaggtcggggatgccgattgcgccatgttgatcgccggccattacaaagcgaagaaggatgccgttgcgctcgacgcctttgtcggcaaggtgtcgctgcgctacgattccgatacgcaaaaggttaaatccctaacgaagtgacccgatgaagcgtttattacctatttcgctgcttttggcggcactctgcatctcgacggcggcttttgcccagaaggacaaggtcgtcgaggcgagcagcaaacggaagccggcatggatcggcagttccgaccggtcgcattttgcggtgacggaggtgggggagacccttgccgccgcctcggggaaatgcatggcctcgatccggcagtatatcgtcaatgccgtggccgtgaatgtctcgtccgccgagaagatggcgacgcgccagatcacgcgcgaccagctggtcacggcgatgagcgactattcgtcggcgctgatgaccgaggccggacagctgccctacctgaacaacatcaccctctcgaacgccgaggcggtctactgggagcggatatacagcaagaagaccaagacctaccgctatgaatattcggtgctgtaccccttcccggagcagacacggcggcagctgatcgaggctttcgtggccatcgacgacgccaagcaggccgagtatgaacggctgcggcgcgaactgggcacgattacggacatagactgtatccagctggcggtaaacgagctggacgggttgtacgactatttcttcgacgccacccgcaagggcgatgtcgagaccctgcggcgcaattaccgggcactgtacaatgccgtgtcgatcgaggtggagtccgaggcgccgggcgagtgcgtctattccctgcggctcaacggccgtccggccacgaccgccgtgcagccgcgcctgaaaagcgaatcggtgctggagatggccgtcaagccctatggcgacggccgctacctgctctcctatgacccgcagtacgcttcgccgaccgatatcaacaagatcgaagtgctctacctgttcggcggtgcgcgcgtgtcgcagacgatctttttcaatccggccgaggacgccgtttcagtccggcccaagggcacgctcaggatcgaacagtccggcggggtgatccgcgggacgatgcaactgcgcgtaagcgggacggcggccgaggtgcggcggatcgtgctgttcaacccggccgacggggcccggatcgtggctgaaaggatcgaaccctcgcagctcgccgcgggcgattgcagcgtaacgttcgaggcgcaaggctcgataagccccgcaaccgacggggtggacgtactcaggggaagcatcggattcgggaatcccgccgacgggaaggcctccgaagccgattttacattgcactataaacttacaaccaaataatccgaaagatgaaaagaacccttattggagctatcgctctcctgctcgctgccggcgccgtgtcgtgcagttcgtcgaaaaaggcctccgggcccgctgcccctgcgggcatggtcgaagaggctattccgctcagcggcgcacagtaccgcagcaatgccgaatattaccgtgccgtgcagaacggcgtgagcaccgagcgcagcacggcgcagaagatcgccatgcagaattgccgccaggatcttgccgcggccatccaggccgatgtgaagctcgtcatcgagaactatgtgaagaaccaggatacgggcgtttccgccgagcacaagtcgcagtatcaggaactggcttacacggccgtcggccagcagttgcgcgacgtgcaggtcgtcgaggagaagatgttccgccaggacaacggctcgttccgttactatgtctgcatgcagcttcccaaggctgccctggaggcagccatcgaggatgcgatcgccaaggatgccaaactcaacctggaattcgaccgcgcccagttcaaaaagatcttcgaggagcagatggctgctttctcgcagcagtagccgtattggccggcacatgtccaatcgagagacggcgctcccctcggacgagggaagccgccgtcttttacccgtaaccgctccgcctatgaaacgctatctgaccctgttgctgtcgctgcttttcgtgcttcccctgccggcgcagtcccgccgggaggcgttgctggaataccaggcgcgccgcaggcaggcctataccgaattccgggacaactaccgcaaggcgtgcgccgacttcatgcgcaagcgctgggaggctttccgcgccgaggctccggtacccgtgcccgaacgccgggaacccgacatccccgttatgaaacgcccggatgcgccctctgtgccgacgcaggacaggatgccttacgacaaggtggtcgacctgcccgagccggctccggagatgcccgatgcgcccgggattgcggaaactcctgtgcttcccggcaaacccgccgcgggaaagggggccggggataacggtgtgcagcaggggcggaaacccgtcgcggggacggacgacgcggctccggcggtggacgtttcgcgtcccttcaagttcacgttctacggcacgggctgttccgtatcgctggctgcgaaacaccgcttcaacctcgcctcggtgcaggagaacagcgtggccaatgcctgggaaggtgtttcgcgaggttcatacgatgccgtggcggcggagtgcgtggcgctgaaaaaggcgctggggctcaacgactggggctattacgaccttgtgcggacactcgccgacggattctgcggccccaaaacgaacgaatcggtcgtcctgcaatcgttcctgatggccgaggcgggctataaagtgcgcatggcgcgcggcggcgggcggctgttcctgttgctggccaccgacgggcaggtctatgcccgtccctatttcaatatcgacggccaggtattttatatcctggacgatgtcccgcgggccgcgtcgtacaatatctgcaatttcacgatccccggggagcggcctttgtcgctggcgatgcccgcgccgcccctcttcgcgcagaaacccgcggcgcccgtcgttcgcaatttcgacggcgtggtttcgacgacggtgacggtaaaccgcaacctgatggatttctatacgaattatccgccctgtcactggagcgtctatgcggccacggcgcttaccgctccggtgcgcgggcaactctatcccccgctgcgcgccgcagtggccgggaagggcgagcgcgaggcggcggaactgctgctgcactacctgcacagggctttcccctacaagaccgacgaagcgcagttcggcatcgagcggacactcttcgccgaggagatgtactactatccgtacagcgactgcgaagaccgttcgatcctctttgcgcggctggtcaaggatctgctggggctggatgtcgtgctgctctattatccggcgcatatcgccacggcggtatgcttcaaaggcgaggtgaagggcgactacatgcagctcggcaacaaacgctatgtaatctgcgatgcgacctatatcggtgccggcgtgggcgaggcgatgcctgacctgaaacgtacgccggcccaagtcgtccggattgattaaccctttaaaaccgattcgcgatgttttgtcccaattgtggaaagaaatgcggtgataacgaccttttctgcgggggttgcggcaccaggctccccgcccgcccggtgacggcatccccggcggcagatgcggcacccgttgccccggctgtccgggctgcgggcgataccccggcggcttcggcctcgcatggcgccgcaaacccctcgggatgcggggcggcatccgccgcaagcgcccgggcagccgcccgggccggaagctgcgcagccgcgggctcgaaggagccggcggggcctatggccgagggcgtcatcttcaccaacctgcaggctctggcccgcaaattcggaaccgatgccgcggcggtgcgcaagttgctcgccgcttatgccgaagcatcggcggcacacggcatccgttaccgcatcgtcgatgccggcgactatgtttttctcaaccccgaggccgggcgcaaccgcgccgtggcgctttcaccggccgattcgtgggtcgaacacggttacctgctggcggactattaccgtttcgggcgcagcacggccgacgatgaaaccaactacctgttcatcgtcggaggcgccgatgtcattcccatgcccgtcctgccgcagtatatctccgatcccgattacagcgatacggacatcgactccgatatcccttatgcctacctgctgggcgagcggacttaccccatgctggggacggccgaaattttccagtacgaacaatatttccatacgggacgcctgccgctggcgcatgacgcgtcgctggacgacctggccggatacctgcgccgcgcggccaaagcccccggttcgatggccgtgggcagggcttacgggcagaccgatctcacgtggctttcggcctcggcttcggtcagcgagcctttccgccgcaatcgactcttccggggcgacgtgcggctcgatgagcgtatctatacgcagaacctttttgtcagcccctgcgtcgagcgttcgatcgtcgacaaggttttcgaccggggtgcggacttctactatttcaacctgcacggcagcgatgccccgaccgcatgcagcttctatgcttcctaccagcagcaatgttacgaggcagtcacgccccggcagctggcgtccgccgagaaaccgaacgtggtggtgaccgaggcgtgctatggcgggaaattccaggattacggccgcggcgagacgatgctgctcgcggcgatgggcgacatgacgctgctctacctggggtcgtcgcgcatcgcgtggggtgcttcgaagagcagttcggcagccgacctggacaatgccgaccgcctgacgaacgtctatatggccaaattgctcgaggggtatacggccggcgaggcattctacatggcacggcagagcttctttgattataatgacggttactttacgccccaccaggcacttacgatcgtcgagttcaaccttttcggcgatccgttcctgcatgtgggtgtgcgccgggagggggcgaaggcgcatccccgggcggtcaaggcgctggcgaaaggcgcagtcaatgcggtcgttgaacgcaagtgcgtctatgaagccgctccggcatcgttgctcgaccgggtgcgcagcgccgtcgaccgcaacctgtcgctcatccgcgccactgtcgaccggcaattgtacgaacaactgggggtcgaaccgcgcagcttgtcgaccgtcacccgcatgaaatacggcaacggcgacgagttttatgccttcaattacctgcagaccgacggtaccataaagagctgccatacggcgaccgccgacctgaaaggaaacgtgaaatcaatcatatcaaccaaatagaacgactactatgaaatgccagaattgtaattccgaactcctggaggatgcgaagttctgcacgacgtgcggtacgcccgtcgccgctgcgcccgcaggccccgtgtgcccgaaatgcaatgccccgatgctgcccgacgccaggttctgcacgacgtgcggcgtggcggtcgaacctgccgctgcacaggcgtcccaggcgccggacgggcaggctgccggaggcggcgagctcgccacggtgaaacagaagattttctggaatatccagaaaggcgaagtcgcctgccgggtcaatgaatcggagtttatccgctacgattcggcgcaggggctgatcgtaaacgacggcacgacggcgtatatcaaggccaacggcaaggtgctggccgaaatccacgggggcatctacgatttcgtagaccccgacgagctcaagcgcgtactcgaaagccgtacgggcggggctgcggggctggtggccggcagcggccgtttcctgataaacgccctgctgggacgctgcgtgaaggacaagttcgacgacaaggacgctcccgaacggcagcgctcgctcgatgccgtgatcgagagcatgaaacggcacgaggctttctcgctgctgctcaagctcgacaagagtttctcgctggtattcggttcgggaacgaccgaggatatggccgagttcaggccgatgtccgtgcgcacgaaactgctggacttgcaggtcggcctgcgcgtgattttccgcatcgccgacttcgatcgtttcgccgaatatttcctgacggacgagcccgtcgccacgacccgcaggattgcggagaagttgcagcccgtaatgcagaatgccgtgcaggccgtgatgcaggatcgccaggtcgaaggcacgtcgatcccggcggaggtcgccgaggcgatcacggccaggattgccgcttccggcgaccagttctacggccttgcgctggagcgcgtggccgaagtggtggcttcgaacgaagacctggaacgcctgcgcagcctgagccgcgaactttacctttcggagcaggaactcgactacctgcgccgcaccaacgatttccgcaaccgcctggctgcggagaccaattcgcaggctattgccgatgcacgcagcgacatgcagctctatgaggggttgcagcaggtcaataaagaccgcctgctggccgacgacgagctggataagttttataccgtgctttcgcgcgagaaacggatccgcgatgcccgcagcgaggacgaggtggaggctgcactggccgacatcgaaaagaccgggctgctgcgcgaagaggacgtcgacaacctgcgcatcgacgtcgccgaacgccgttaccgccggggcgaggcgatcaagctcatgcagctgcgcgaccagatcgagttcgagaaagtccgcacggcgggcgaagggcaggtcgccgtggagcagatgcgccaggggctggagttgcaggagctgacgctcgcgcatcgcaagtgcgaggacgagtattccgacgaacgccgcgcccgggagcgcgagttgcagcgggcagaccgccagtcggagatagaactggacaatgccgagatggatgcccagatcgaacgcctgcgcaaggtcaaggagctcaaccgcgaggacaagaagatggatttggatcacgagcgcgagatggagcgcctgaagcaggaagccctcgacaagaaggcgcggatgacggccgagcagctgatggccgtggctgcgggcgagaacctcgattcgcaggccgcggtgaagttcgccgagtcgttctcggcgggaaagaacgccgaacaggtgcagcaggccgccgatgcccgtatcgccgattcgcagcgccacgaagaccgtatgttggagatgatgcgcgagatgaaggatatggccacgaccatgaccgggcacatcgtccagaacaaggatgccgaacgcgaccgttaccgcgaacggatggaacgccaggaagaccgcgtggacaagacgcaggacagtgccctcgaatatgcgacgcgcaacaaccagcaggcggccgcaaagccccaggcgcaggctccccagtccgtcgggcgggtatgtcccgactgcggtacggtagccgtgcagggcgtgcgtttctgcgccaactgcgggcgggatctcaaatgagcacggccatggagagataccagggagtaatactgatccggttgcagaatgccgggtcgaaatccgaagggcattatgcctttctggtgcgtgacgacgac

SEQ ID NO: 323 - DNA, 13124 bp, Alistipes onderdonkii
  source 1..13124: mol_type = genomic DNA
aattggacgagttcatatcggtctatttgcaccgtgtcccgctccatgagataaacaaagacgctatgacaattttccttgcaggaggagtttcgggcaacctccgcgatttttggcaaaaggttatgaaaatttatttggccgcgccgcatagccgcagcgaagtagtcgaggcgatgaagtcttttatcgccgagggcaacggtgcgcaggaatccatctacaactcggaatttatcgaggacggggagaaatccctttcgggcatcaacgtcctcgaaagctattattacctgcggaagaatgagaatttcatgccgcttgttaggtacttcggatcatttctcctcgatagcggcgcttatacgttcatggcaggctctcacaagggcgggtgcgattgggatgcctatgtctcggaatacgccgatttcatcaaccgtcatgatgtcaaactcttcttcgagctggacatcgacagcgtcgtaggattggcggaagtcgagcgtctgcggtacaagctcgaaagaatgacgggcaagaagccgatccccgtatggcacaagaaccgaggcaaggagtatttcgtcaagatgtgcgaggagtatccgtatgtcgccatcggaggcatcgtaacgaaagaaatcccccgcgcaatctatgaaaaggcgtttccgtggttcatcaacaccgcccacaagcacaaggcgaagattcacgggctgggctataccaccgtcgccaatctgcaaaagtatcatttcgattccgtcgatagcacggcatggctctacggcaatcgcggcggctatctctacaagttcaacccccgcacgggcctgatggagcagatgagcaaagagggatgcaggctcaaagcgcgaggcggcgcggtaaacaacttcaacgagtgggtgaaattcagcaaatacgccgataaattcctgtaattccgctcgctatataaaaataatcaacttcaaaaatacggacatgaaagattcagcaatcgttgtatcgggaggcatggacagcatcaccctcctctatgagaaagccgctaatatcgctttggcggttacgttcgactatgggagcaaccacaacaagcgggagatcgcatgtgcggcctaccattgccagcagctcagcatcgagcacatcatcatcccgctcgcattcatcgggcagcacttcaaatcatcgctcttggagggcgcggacgccgtgccggagggccactatgaggctgaaaacatgaaatcgaccgtcgtgccgttccgcaacggcatcatgctctcggtcgcctgcgggctggccgaaagccgaaagttgagccatgtgctcatcgccaaccatcatggcgaccactcaatctatcccgattgccgcgcggggttcgttcatgcaatgtcggaagccatgcggcacggcacatacatcggggtaacgattgatgccccctacaccgacatcagcaaggccgacatcgcccgcattggcaagcggatcggcgtagattactcgaaaacctactcctgctacaagggcggcgagaaacattgcggcaaatgcgggacatgcgtagagcgcaaggaagccctccgagatgcagacatccaagacccgacggagtatgagaccgagtaatgccaatctcatcacgctgaatgccgtttttgtcgtgtgcctgatcgtagcgaatgtagttacgagcaaggtgctcgacaccggcatttttatcggcggcgttcccgtactcattccgggcgcggctctgacctatgccatgactttcctctgcacggatgttatcggcgagatatggggcaaggaggaagcgaataaagccgtcatcaggggctttgccgcgcagctcgtcgccctcgcattgatcgtcctgacaatgtatctcccagcctatgacgaggagatgcagcgggcgtataagatgctgctcggtcagacaccgatattcgtctgcggatcgctcgtcgcctacctctgttcgcagagctgggatgtgtggattttccataaaatccgaaatcggttctgcggtgatccgcgccgtcggtggatatggaataacgcctcgacgctgacctcgcagatcatcgacacggcgatttacatctcaatcgcattcggcatcggcttcggatggttcaggcaggagggcggcatcaagatcaccctctgcatgattatcggccaatacctgctcaaagctctgttggcgatatgcgacaccccgattttttatctattaactcgcaagcataaagacaaatagctatgtattacgtttcaaagaaaatggagatcgcggggagccatcggctcgatctctcctacaaaagcccctgccagcagttgcacggccacaactgggttgtaacggttttctgcaaggccaagaaactgaacaaagacggaatggtatgcgacttcaagcatatcaaaagcaagattcacggctacctcgatcatggcaacttcaacaagctgctgccgttcaacccgaccgccgagaacatcgcccgatggatcgtcgagcagattcccgaatgctacaaggcaagggtacaggaaagcgagggcaacatcgctgtctatgttgccgatcacgataacgaagaggaggcaggattatgagggtaaacgaaattttctactcgattcagggtgagggccgctttaccggcactccggcaatcttcatccggctcgcagggtgcaatttgcgctgcgatttctgcgataccgagcatcagccctaccaagacctcaccgaagaggagatcatgcatcaaatcgcagaatttcccgcctctcacgtcgtcatcacaggcggcgaaccgatgctccaactcactctctcgctcttgaaccgactgcataacgcaggcaagttcgttcaggtcgagaccaacggcacgatcccgatcaagggctaccgtcctatcgactggatcacctgctctccgaaattcgacttctgccctcatgccgagctgcggctccaacgcatcgacgagctgaaagtcgtctatcaaggacaggacatgacggcatacgaccgcatcgaggccaaagagttctacttgcagccgtgcgatgtcaaggacgaggcccgcaacaaggcgaatatcgccgacaccatcaactacctcaaaacacacccgaaatggaagctatcactccaaacgcagaagatattatctgtgcgataaaaacgctcatccgcgccatcggcgaagaccccgaccgtgagggattggtcggcacgcccgaccgcatcgtgaggatgtggaaagagatattcaggggttacgatcccgatcagaagccgaagatcaccacgttcgccaatgaggagggcatctccgatattgtgttcgactgcggcgattactactccatgtgcgagcatcatatcctgccgttcttcggacgctattacttcgcctatgttcccagcccgaaagggcggattctcggcatcagcaaggtcgcccgcgtcgtcggctactgtgccgctcggttgcagttacaggaaaagctcgcgcgggacatcgtgcagatgctctccgaggctctgaacaacgaagctctcggattcgctatcgtgatgaaagggcaacacctgtgcaagaccatgcgcggcgtgaggaacgacggcaagatgtccgtcgcccacttcacggggactttccaatacaactccgagctgcgcaaggagttctacaaactcatcgacctgaacaatggctaaattcaatactgcaaaaatcgaggagtgcgaggcatgggtagctactcacgggctgatcgactacggcggggcgaagctgaaagagttcgtccgcgaaatgggaatcgacgagaagacctaccgtctttggatgaaaggcaagccgcagttcaaagaggctatcgaccgggcaaaggaggttttcaagcagaacctatcccatgacctcgccatctccctctcgcaagccgcgaaagggtacgagcacgaggaggtggagcaggagtttcgacttggccccgacgggcaaccgacgccgttcaagttgaagaagaagaaaatccacgtccaaccgaacattggggccgcgatcttcctgcttaccaatctcgatcccgaacactacaagaaccggcaacacaacgacatgatattcaaaaaggataacgacgaaaaaccgatgacactcgatgagatcaatgcagaaatcgaaaggcttgataagttggataacaaggagtaatgagatcatctacaatcgagatacgacagcagttgatgagattgaagcgcgagaagttaaagctcgaagctccaagctcgtttcctcatttcctcggttatagcaatcccaaatacgagttagagtggttccatagacttatcgccgaatattgtcaaatgctcttgcagggcaagatcaaaaacctcatggttttcatgcccccgcagcacggcaagtcggaaatcatctcccgcaacttccccgcatgggcattgggccaagaccccgatttgaagatcgtcggttgctcctactcctccgacctcgcgcagcagttttcgcgctcgattcagaggatcatcgacagcaaggagtatcaggcgatattccccgataccttcctcaatgggtcgaatatccgcacggattcacggggctatttgaggaatgtcgatctcttcgagatggtcggacgccgaggcttctacaaggcggtcggcgtaggcggttctttgacaggtacacccgtcgatatagcgatcatcgacgacccggtgaaagatgcaaatgaggcgaactccatcacctaccgacagagggtttgggattggtacaacaccgtcctttcgacccgtctgcacaaccattcgcgccagcttttcatcatgacacggtggcatgaggacgacctcgccgggcgtatcctcaaagccgagccgcaggaatggacggtgctcgccatccccgcgatctgcgaacaggagcttgacggcggattgagccggaggcatatcggcgaggcattatggccgtcgcatcactccatcgagaagctgctaaaacagaaagcccgcgctccgcgtgagttcaacgccttgtatcagcagcacccgaccatcgagggaggtaacatcgtcaagcgggattggttccgcactatttcgctggcagagttccgatctctgcggttcaacgagccgatgcacttctacctcgatacggcctacaacaagaagaaaaaggggcaagacaacgaccccagcggcatactggcggcgtgcagaatcgggaattacatctacctctacgatgcgcaaaaggtattcaaggagatgcccgatctattgcggttcctgcctcaatatatcgcggcgcacgatggcaattcagagagcaagctgcatgtcgagccaaaagccaacggagagagcgtggtgcagatgcttcaagaaatatcgacgctcaatgtcaagcggacggccacccctaccgatgacaaggaggtgcgacttcgggccgtctcgccgcgcgtggaatgcggacgggtatttctcgtcgagggatcatggaacgacgattttctcgacgaggtctgcggctttccgagtatgccgcatgatgagttcgtggatattctcggatatgcgataaacgacctctacgatgaggatgacgatatagactacgacgcattaacaaagtcggcgataggtttgtaaaccaatattttaagaatatgatactatttgatttatttcgcaattatctcaatgctcttgtaggtcgcaatcaggagttcgagaagctgctggccgccaaagatatttcggcagtcaaggagggcatgagcaaccgcatggatatggctatcgcggcgctcaaagagtatgatgtagcctctcacgaaatcatgaagcgggaggataagatcatcaccgacaaaaagggcaatttcatccgcttcgagccggtatggaagctgccgatcccgtatcaggtttacatcaacgaaatcgcgctcgttttcctctacggccgccccgtgaaatggatacagcaatcagatggaacagacgaggcgttccaaaagtatcaggaggtcatcgagcacacgcacttcaacagcaagctccgccaatgcaaacgcatcgcaggttcggagaccgagagcgccatgcttttccgcgttttccgcaacgaaaaggacgagccggatgtgcagatacgggtacttgccaaaagcaagggagatgagatatacacgcgctgggatcaatacgagaacctgatctccgtcgcatggggctactatgccaaagaagcgcaagacaacatcgtttaccacttcgacatatacactcctgccgtcatctaccgatgcacccgcaagaacctcggctgggaggtgattcaagaggtgaatttcatcggcaaaatcccgatcatcctcttccagcaggataaggagtggaacggagccgaggcgttgatccatcgtgaggagctgatagcctcccgcaccgccgacaccaacgactatttcgctgatcctatcgccatcatggcctcggagcttatcaagaatctgcccgaaaagaaagaggcggcgaaactgctcatcaccaacgacgccgagggtgtggataaagccgcgaagtatctgacttgggataatgccccgcaatcgaagaaagacgaggtcgagtggctgcaagaccaaatcctgaacaagacgttcacgccgaaaatctccctcgatacgcttaaatcgctggggaacctctcggcaaaggctatgcgcacggtgatgatgctcgcggaggtcaaggccgccaagcacaaagaggtacatgacgagctgttggatcgcacatcatcgctcatcttggcaatcatcgggaatgtcctcgatgtgcgcctcaaatctcaatgcgaaacgctcaaaatcggccatgagtttcaggagccgttcggggacgacatcgtggaatccatcgagaacatcatcaagagtatcgacggaggcatcctatcgaccgaaagcggcgtcgagatgaatcctatcgtcaaggacaagaagctcgaaatggagcgtctgaaagccgaagaggaggaacgggcgcagaaacagcaacagatattcggcgacatcgacggcggcgggcctcaatccgccacagatggcgacgatgatcccgacgatgacggagcagatgacgacccgaagaagaagcaacagcagaagtaagtaaccaatggcaaaaaaagcatattcgcccgatccgaaagcgatcacgatccagcgcatcatgcgcacggaggcttacgccgagaaagtgaggagattattcgccgccacggtaaatgaaatcctcgcgctcaacaagtccgtgccgaggctggatgagggggttatgtactcattcgacggcgacagccagcggatgcagaagaaagtcgaggcattgctccggcaactgcattccgttgtaacaatggctatccgcaaaggcattgcgctcgaatgggaacaggccaacatcgaatgcgataaactcgtctcctcatgcttcggcaaggagatattatccagcccggagttcagcgcatggacgaaccgcaatacggcggcgatgaatgcttttgccaatcggtcggatgacggcctcaatctatcgcagaaagtatggaaatccgtgcgccagttccgcgatcagatggaggtcgccatgaccgtagccatcggcgagggcgattccgcccaatccatgtcccgcaaagtgcggcaatacctgaacgaccccgatctgatgttccgccgtttccgcttcaagaaaggcgaggatgcgcagggaaaccccatctatggcctgaaatggaagaagcgcatcaaggacgagaaaacgggcaaataccgatggatcgactacgacaagtcatcgtaccacgacgaatggacggggaaaggctattacaagtcctcggctcaaaacgcgatgcgcgtaacaaggacggagacgaatatcgcctaccgtcgttccgaccatgagcggtggaagcaaatggagttcgtcctcggtcagcgcatccagctctcgaagaaccacccgaagaaagacatctgcgataaattggcgggcgactatccgcctgacttcgtattcgacggctggcatgtgcaatgtttctgcttcgccacgccgatcctgatggacgaggaggagatggcaaaggttacggcggcattcctcaaaggcgagaaatacacgccgcaggggaagaagatcaccgaatatcccgataatttcaagagctgggtgcaggataacaaggagaatatccttgcatcgcgcgataaaggcacggagccgtactttattcgcaataacgcccgtgctatcgacgagatactcaacccgcagccgaaagagcttacaatcgcagaaaaagcggcaatacggcatgaggcccgcacccctgaacaggcggatgcgattcggaatgcgtgggcggagcggcagaagaagcaccagcagatcaaaacggcggccaacaatatcgtcaaggtcgccggagattacggcgaggtcgattattccaccttgcagaagtacatcgacgccggggacttgtcggccatgcaagccgagaccaagaaagtggcgcagacgatcctcgccaccaagaaagccgagcaatcgctgtcctctatcatcccgaatgttcactcgtggcataagcagttcacgatggagcaactgcaaggcgtgtataatgccgtcaaatcgaagatcgagggctgggccgacctttccctcgaacagcaggccaagaagctcaaattcgaggcttatgacttcctcggcggcaatatgaaaggcgtgcaggacaagtacccgacatggaaagtatcgcaggaggcgtacatcaatgaatacaacgccgtcagctacaaaatcgccgttcagcaggccatatccgacctcgcggatgtcaagcaatggtcgatggcccacccgaagagcctcaatgtcgccaaactcctttccgatgcagagcaggcggtatatggcaacgccgagctgtcggtcatcaagtccaagaccgctctcgccgtcgccgagcatcagaagcgcctcgcggagcaggcccgccgagatgcgaaaagagccgggcaaagcgcatccgttcagttcggaagcgacgcctatacccaaaagcggaaagacgcggcattttggactgaatcgcaaagagatggtgataaatattataccacctacgccggggatgattgggagagatggagcaaagaagaaaagcatgtcgcctatctctatacgagcgggagccgctatatcaatgagcctctatttgccaaatactacgggacgaaatacagcgatattgacggcagcacccgcaatagctggcgcgacataaacacgctaacgaccatgatcgacaaggcaaagcccctcgctcgcgacgtttggatgcagcacggcgaggatatggatgcgtttgtcggcaaattcggcgtgaatctcgaaactttatcggcgtcccaacttaaaggcatggtcggtaaaatcggcacaaatgcgccgttcaccagttgcggcgtcaccaaaggaacgggattcagcagtgaggaggtcattctcaacatctactgtcccaaaggtacgaaaggcatatatacggagccttattcccactatggagacggcggatatggagtgcggggtttcaaatgggatggcaaaagccgtctatccgccggatatgatcccggtagtgaaatggagttcatcctccaacgcggcacgaagttccgcatcaccaaaatcgaaaagaaaggctatcggtactacattgatgtcgatataatcgagcaaccagccaaattccccgatactatataacgaaacgagagggatcatctccctctcgttttcaatctccgtaatacttctcgatcagcttcttgaagccctccgccccgcctccgaaatgcgtatagcggtcatacaggagagctatcagcgatacaggcacgcgagtatgatctatcaattcgggcaaatcccgatgcagatagaggcagtaatcggcgagtaaagagttcggggtatcttctcccgccattttgagccatatctgctcgtaagaccaaagcatcgccttattttgatccttgccctcgtatgggttcttatcctcgcccttgtaatagcggcagagtttcaataattcggcctttttcatcggaacctctcattaaatcgtttgattacatccctcatgtcgctcggcagataactcatcgcggcctgaatcatcgccggatcgaccacgaaataagcctcggcgagcgatccgacgatagcgccaagcgtatcgctgtcgccgccgtagagaatggccttgcgaatcgcatcctcgaaagaccggctctctttgacgatatgaaaggccagcggcacgcacccctgacacgtctcgtcgaacttgcccctcggtatgaggtgctgctcccaattttcgccataatatcgagtagcaacggcctcgatgttgagtattctggaatcctcacaacgggcatttttcagccaatatatcaattcagcgacggaaaccgcaccgattatcccctcggtatggtcatgcgatattttcgccgtttccgtcgcttctcggatcacttctgccattgagcggtaagcccatgcgataggactgacccgcatcgccgcgccattgccgaagctgtcatacggctgcggatcgggcgaattgagccagcgcgagaaagaggccccgtatgcgcccatcgggttggggtacttcctgcaccagcgcaggatgctcgatttatagtctatccctttgagtatcgcatcggcaaccgccaccgtgcagattgtgtcgtcggtgaaatcgcattgcttggtgaacaatgcaaaattgccgctttttgcgttgttgaactcgaatcgagaacctacgatgtcgcctattatcgctcctatcatatcagaatttttttgaatctatcacttggtctatatccagcaccccgtcggcatcttctctcatcgaatgcagatagatgtagccgtaatggtggaatgagaccgtttccagctttttacgatacatagcctctgctttctcccgatccacgaagtacaaatgcgtaacgagatcgtatgaatccgcaacataggtcagccgatatactttgctctccatatcccgctattttgatgcttgtccccgtgctttccgctggattctcccgatgcggataagcacctttttgttttcatatgcccgctcctcgaaattgtgattcgtgagcgacttgtatttgatgccgaccgcttcgaccggaacggcatcgtagattgctttcagagaaccgaaatagagatcggtctttccgagatacggctctttgaactgcaaatgcacgatcttctttgcttccatatccagttattgtgcaaatttaccgcttttccggcgatttgccacgctttcacgcaacaatcgaccatcttatcggccacctcggagaaatgacggcaaatcgcctgtttttgctttttcttttttcgcggaacttttttcttttaacggatgaatttatgggaattttatccgatggtgtatctgatgttttttcaaccgaaaaaacttcccctctctatattgtcttatatatcttatattcttatattcagtatcgcgggtattatcgtgggtattatcgtcagcgttatcatgggcttaaaaatatcaatgataacagccaatcatacaagcaattataagtattattcaggtagaactaccctttatacatccttcgcttcggctgccgtttttgccttgaccgtgtaggactgcgaccaagtcatatccaccgtaacctcgtaggtctttgtcttctttgccgttgccatgatcctactacttttgtgataaccataaatcccgttttgcacggcagctatcgagtgatgaccctacgcaggagaatagtttcccgctctccgtgcggtagtcatattgccatctcttgaccgttttccggcctactttggccgtgaaactcgtgtagttttcttgccccggctggcatacggagcacccgtttacattgatcgaattatccattgcgttgaattttaaggtttgcgattattgctcggcctcgaaatcatcaacgatctcgaatgcgtcggttttgagagcggtatccggctccccgtcgaactcgttgttgcatttcgtgcagagcctcatggcctgatgcgaatagtctaaatttatatccacgacatacgtccctttctgcgtttggaatacctcccgactccacgaatcgaatcctacatgcttgattttgatcttttccatatctgcgattatttgagattatttttcagccatattttgtcggcctcccacaaaggcaagcctttggatattttgcggcgaatcacctctctcatgccgatcaagtcggccgccttgatgaggaatgttacgtcgccgaatttctgcgctttttcaaggaggaagtccgccatttcggacttccattcgtgcaggctatccgcctcggttgatcttggcttgctcatggtttatgcgttgattaggttcattatttgttcgagtttcttttcgagggcatatcgcttttcgcactcttcggcatattttttatagaactcatcgtgcttggccttttccgcgtaatacttatcctgataggacgttgcgagttcgacctgccgagcatagccctctttttgcactctaatcgttttcttcaactcggctatctcgatcaccatcgaccgggaaagatcgagatgccctttcttggtggcgaatggcttgcagaactcatccttgtccttatccgaggacatatacaccccgttccatacctcaaaaattccgtccgatacattcaatcccacccgttcggtaaattcttctcttgtcatagcctttataaattttattcagtttgcaatatacaacctattaagtacc

SEQ ID NO: 324 - DNA, 5359 bp, Alistipes onderdonkii
  source 1..5359: mol_type = genomic DNA
gttcgacctgaaggacgggtgtgtggagttcttcgtccaggatacgggcatgggcataccgcccgagaaggcgcgcaatatcttcgaccggttcgtcaaacttaacgatttcgtgtccggcacgggactcgggctggccatttcgaagatgatcatcgaaaaactcgacggaacgatcggcgtggattccgaacccgggaagggcacgcggttccatttctcgatccccgtcgtccaccgggacggcagcaaaaacgacgagcagctttgtgccgccccgggccgggacgacggcaagtcgtgggtgctgctggtcgccgaggattcggacaccaatttcagactcatcgaagccgtcctcagccgccgctttagcctcgtgcgtgcccatacgggagccgtggccgtggacatgttcgggacggtacagcccgatgccgtgctgatggacatccgcatgcccgtgatggacggccttgaggctacgcggcgtatccgcagcgtttcggcggacgtccccattattgccatgtcggcctattcgtccggcagcgagatcgagagcgcccgcaatgcggggtgcaacgaatttctcgtcaaaccactctcgcagtattcgctccaccgggcgctgaatgccgctctggtggagttcaagggtaagggcaaatcataaccgggtcgcccccggaaacggaacgtcccgcaagccgtgtgctgcgggacgttccgttttatcgtatggcgcgcctaccggtaccggtgcgagatcagggtcatgaactcttcgcgcgtacggtggtcggagaggaaaatcccggtgaaggccgaggtcgtcgtcgccgactgttgcttttcgatgccgcgcatctgcatgcacatgtggctcgcttcgatcacgacggctacgcccatggggttcagcgcctcctggatgcagtcgcggatctgcaccgtcagcctctcttgtacctgcaggcggcgggcgaagcactccaccacacgggctattttggaaagccccgtgatatggccgttggggatgtaggcgacatgcgccttgccgtagaacggtagcatatgatgctcgcagagcgaataaagttcgatgtccttcaccagcaccatctgcttgtactcttcgcggaacgtcgccgagcggatgatctccaacgggttttcgtcatatcctttcgtcaggaacgacattgccttggccacccgttcgggggtcttctgcaacccttcgcgtgcgggatcctcgcccagcaaccgcagtatttcggtgtagtggtgctttagctcttcgatggccttggcgtcgaaacgctccaccttgttgtaatttctctcttccataggaacggcaaagatagtgcaagccgagggcaaaagcaagtttacttgcaatttgccgaggcgccgcctgtctaaaacagggttaaagacgatgcaagccgggcgcaatgccgaatttattcggacattgccggggcgccgcctgtttttcgtaaagacgcttatttctcgacggaatgcaaatacgcggcgagtttgcgtacggcacgggcccggtgcgacacttcgtttttctccccggtggtcatctgcgcgaaggttcggtcgtatccgtcggggatgaacagcgggtcgaacccgaatccctcgtgccccgtttcccggtcgatgatgcgcccctcgacgatcccttcgaaaaggtgctcttcgccgtccaggagcagcgatatcaccgtgcggaaccgtgcccggcggttggccttccctttgaggtttttcagcagcagccggttgttggccgcgaagtcgtgcccgtcggtggcgtagcgtgccgagtgtacgcccggggccccgcccagcgcttcgacttcgagccccgtgtcgtcggcgaagcaatccattccggtgcgttcgtgcaggtaatgcgccttctgcgaggcgttgccttcgagggtatcctgttcctcggggatctcctccgtcacgccgcagtcgcggggtgtcagcaacttgtatccgggccccagtacggcctgtacctcggtgagcttgtgtgcgttgttggttgcgaaaataatgtccatattctctttttccgatgcttgaatctttcgtcgggatgcccggctttcctcgctgcccgtctccgggggcgtcccgggcatatccgcttcccgtcccgctggccgggttatttcacgacttcgagtttttcgagccggtcgtccaggtcgatcttgtcgatgatggttttgaccaggatgtccatgtccgagccttcggaatagtcggccgggcagacgtggcttacgcggttgtcatggatcagcgaggccatctccttgcgggcacccttctggtcggggttgtagaccgcgatcgaatgtccgccggaatttttcaccagccgcatgcaggggatgtcggtcgtcccgtcgcccacgtagatcatgtgcttgaacggcacgggacgttcgttttcggggatgtaacggttcaccatcttgctgtcgaataccgattcgacgcctttgttgatcttgaagatgaactgcgtcttgttggtgtagttgaccgccacggcgggccagtaggcgatgccgtcgacgtcgtagagaaacgaacaggcatagatcttccggaactcgtgtgcgatctgagttccttcgatgatctccttcatccctgacgagttgatgtagtgcaggattcttatcccgtgtgcggcgccgtaggcgttgatccgcgcaaaccactccttcacgcccttgtaaagcgtcacacggcgtcccgaatcctgaaatgcctcgcgccgcagcgacagccctttcgacttggcttcctgtaacatgcgtgccatgtaggtcagtaccatgtcggcatcctgttcttcggccagcgtgttggcctccgtccagaattccttgttgcttttgcccacggcgggtatgaagtcgtactcctgcatgttgccgggggcgagcgtgccgtcgaaatcgtagataagggctatggtgaatctgaattccatcgttttcaaagttttgaagatcaaatatgtataaatgaataggtcaaaagatatctatggagtttggattggtgtagacagcgtactgcattccgaattcatgtatctgtccggttttggttactactttcaccctgtatgagaaaaaaggattgttttcgaatgtcgtataatcgaaaaagtagagcttatgataagagtgatggtaccgattaatacttccattgtctacgaaatgatataaacattgatggaagtttcttttgatccccttcttccttgctaattcaagcaacagactttgtatctctttattattgcaataatctgcgtaatccgacgtattgtcgagtggaatcccgttcaacagtatctttcctttgaaaaattttgccggaacatcggccggatccggatcgtcatagtcgtattccttttctttaggcaggtaatcccaatgcagattgaactccattacttctttttcgggggagactaaagctgtaaagcctatcgtgtcccagaaatagcggttgtatcctgtattgtaatcttttccgtaaaggattctctcgcaagatccgaatatctcgataagcgagtcaatgggtatgtttatcgagaatgtccggccattgtaagtagcacgctcctccgtaaatacgaacagatgctgggtattgactccctttgcgtctaattcctcctttgtatagccggaacccatgtatccttcgtcggcaacttcgcctgctccgctgcatgcgacggtgaaaatacctaatagaaacgagaggattatattttttattttcatcattttaagtaataggtatttctgtgcttcccggttgggagtgctgtatggaatgtatggctgattttgttgcattcctttgcctggatgcggtgaacgtttggttcggtaaataatagttcggtatatcggattgcgaatcctgctgaaatattatcaatttaacaaagatagttttttttcactatttttgcaaaagagaggccgaaaacacaaaatataaaaacagatggaattcaaagagttgatcgaaaaacgccgcagcatccgcaaattctcggagcgtgcggtgccgcgtgaggtcgtagaccgcatcctgcacgagactctgtcggcgccatcggcgcgcaatacccgtacgacgcgcctggtggtggtcgacgaccctgccctggtggcccgcatggccgacatgcgcgattacggttcggcgttcatgaagggtgccccgctggcgatcgtcgtgctgggcgataccacgaaaagcgacctgtggcgggagaacgccgcgatctcggcgaccatcctgcaactggcgtgtgtcgacgaaggactggcttcgtgctgggtgcacatcgacggccgcccgcgccgcaaggacgagcccggcggggagactgccgccggctacctgcgcagcttcctgcccatcccggcggactgccaacccctctgcgccgttgcggcggggtattccgacttcacccccgccccgctgcccgggtcggacgacgatgcgcggatcatccgcctggagtaagaacggatacgggcaccgatgaaaaaggaagctcccgacggggcttcctttttccatttaaatcagcgtcatgcgcttgcgaagcatgtcgagtacctgtgttttgagttgccgggcgttgatcggcttgggcatgtagccgtcgaatccgctcgagagtaccttctgttcgtcggatgcgaaggcgaaagccgtcacggcgatgatcggcacgtcggccgattgtttgcggatctctgccgtggcttcgtagccgtccatcacgggcatgttgatgtccatgagcaccaggtgcggtgtgtgccggttgaataaatcgactgcttcgcggccgttccaggcgtgtacgagcttgtattcatggcgcaggatcgactcgaaaagacggtaattgctttcgttgtcctcggcgatgaggattacgagcttgtccttctcgaccgtcgggatggcctgaagtatctgtgccggggcctccgcctgttccgattggccggggacgtacggaagcgtgaaccaaaaggtcgaacctttgccctcttccgactctacgccgatattcccacccagatgctccacgatcgtccggcagatggaaagcccgagccccgtgccctgcttgaacgagttgagtttgacgaagcgctcgaagactgcgtccttccgttcggcggggataccgcagccggtgtccgcaacccagaaatagagttgtccggcacggagttcgtag

SEQ ID NO: 325 - DNA, 4892 bp, Alistipes onderdonkii
  source 1..4892: mol_type = genomic DNA
ttattttagatttttctcggtttgacttaaccgattgagaaataaacttttagcgaattatttgagaaatagaggtaacgatttagcaactgtgcgaatttcagcgttttacattgctatgctgtcaaataactctttcatttgcaaatataacatctttttccgaaagtacgaactttcggtgacaattttataaaatcgacttgcgaaaaaagaaaattatcgtgaatggtctaactctatataccagccttccttgacgggcttgtatagcgtagtgtcattgtatgtcctgcggtaaattttgttcaggtcgccgtgttcggtgatacggatgtcacggcggcttctcaattcgagatcgtaaacgaaactcttggatgttcccgcatccacgatgccgtgggagtagtacagcataaataagctcacatataccgaatctgccgtttcctgctccctgcggtcaacaaggacaagaccgcatccaatctctgacaacaaggagtcgagttgtattcggtcagatcttgataacccgtgtaccggcgtgtcctgcacttggttcggttggtaggatatttgtcctgccgaatcaaggatgagaatatcgcagggagagagcggtggatagtgaaagcttccctccgaactctccgccatgattttgcgtatcttgtcgaatgccgcctcgtgcgtggcgaagtggcgtatcatttcctcgtccgtcggcggcatgggtggctcgcagcttacgaccgatgcaagcgttaaaagtagtattatgataactatcttcatctctgtttaagccccaccttcaccatgccatgtgcaggtttgggtattgttatcatagttatgttctatccattgccccgatttctcgccgtcagtgtattgtccctcgatagttatatagggtttgccgtcccgtgtcgattccacacgataagagccgtcaagttttccgttacggtagtggcgtattatcctgctgcgaagcgtgctcgcatcctcgaagatttcccactcctcgccatcttttttcccgtcgatataatgagattcaaaaatctgctctcctgtcttgctgtcaaagcggcgctcccgcccgctctccacactctgcttatattccttttcggcttctattttgccgttacgaaaataggtctttacagttccgtctatcttgccttgctgcatgggtgtttcctttcggggagtaacgccgtcttggtaatactccgtgaatgtgctgttacgcttgcctttggcatatatacccgattcacgcagcaccccatcacgatagcggcgataatcaccgtttatcatgccatcggaaaatttaacacactcctcgtcaagtcctcgtataatgcgatattttccccgtaacggctgttttctgccttttttataatagaccgtgcgccgtgagttatctgttatagtctgcaaatcgctccattctacgatttgttgtgcggaaaccgtgccacacaatagtaaaaagatgtatagtgccaatattctattcattgtattttttgtttttcaaggttgcggctaacacgtggctcaatcaccacgaaaagcgattgagccacacgccattatccgcataaatcgaacttgttagcctcttcacttcttcaacaaagcgaaaaattcctcgtatcgctcgaaagattcaaagaatcctgcatgcaatgttatttgtgtatcatccgtcaagaagatttccaattctccttcttcatcgtcatatttaagatgttttatatccgatattttaaatattttgtcggttttctcccctttctttattataggataggttacactatctgcatcgacaacgatttttcctccgttcgccgccaaagcacgggcaagacgaaccttgttcaatgttattaccaagagaacgagtcctccgattataaaaacaatggcagtactcgtagggccaagtattcgggtactgcctattcttataccgaatggataaacgagcggcacgacaaccataccgactgatacagccaacattgtaatgttatccttgataggagaggctggagcataattaaacgttttcataattcaaaaaaaatgtagagttaataaatgttttttaataaagtatcaccattttatataagtccaagggcttttggtatctgtcagtaaatcttctgccaatccaatcatgttggtagttcccatcgacaaagtacgaccaagaacataactataagcatagtctttccaattggtataaacttctttggtcatctcgtaagcggcattgatacactgcatacattcttcttttacaatgtactcttgctcaaggcaaagtctgctgataaagtttaatcttcctgcatcccacgcaagtactccgagtttgcccatttcttctttggatacgacaattccagcttgttcaatgtccggatatttttcctccatcgtttccaacttttccaaacagtcatttcggaaatcggtgtgttctttcaattcttcattttcattaagccacttcctgcttatattaccccctccttgaagaaaagccgtataagcatagtgaaacattgtttgcgagggagcttgcgacaaccaattcaaagtttcgatggcactatccctatccgttataccaaagtattcacctaaaataactttacgaacagagggagttacgccagtttcgaatgtgttcaatacaccttgttgttgatatacatacagattgccaagacttatcttgcgtaaatccgcttctggcaaatgtgaattttcatccacattcaaaccatcctgaaagaaactctgcaattttgcaagtcttccccaaagagatgtcatgtccatagtactatgtttgtctttccagctccttaagaccttttattattaaaccacgaagcgtggaactgcaatgccacgtctttgttgaaggtcgtaggaaaaacctaatgagcagatgtagtaatagcagcccacgctatagcgtgagaaccactatgccatccttgctcattttgaaaatttcctacgttttcaacaacaagataagcataacgcttctttcttttctaatatgtcttggacggagtttccctaatccaaccacaaaggtagtgaaaagttgtgataatcacttatgttgcaatagatttatttgctcgctgtataaaattggagctttacagtttcatacccctgcttttcctttgctgctgtataggttgccgtatgttctgccttaacttctcgaactgttccttaaaccactcggcaatgggctttcggtcgatggcaagaaccaatttagccccgtccgtggggtctttcagcacttggaaacctgccctttcggtcgtgaatttccgtccgtgttcctccgagtagagttcccctgcatactccaacggttttcccttgacgagcgttgcggtctgcctttcatcgaacccgacaaggcggcaaaggttttcgatacggagcatttcacggaaatagggaaaccatgccgcagcctttgcgattaccgttttcaagaaagatatttcctccttgtgcttcgtttccttgtccgctatctccctgcggtgcttccgttctacttccgccatctgtcggctgtggtctgcctgcatggtctgtattctgtcttgcagggcttcgatggtttcctcgtggtcggctacctccctatgcagggcggtgttctccctttccagcgtcttgaccttgttactgccgaaaagagaaccgacactctcggcgatgttggcggctgcgacggttgccgcccctttcagcttctcggtctgtatttcttttttcgcccgtcttagttcttcccgtgccgtttctttctgctgctgcaaatccaccacttccgctttgaggtcgtcggagagtttctgtatatcccgataatactgctgcgtggacttgtgacgagctttcgagccgtctatgcccctttgcagcccgtatttcgccatcgccacggcataggtatcttggtaggacttcaatttcagccgtgtcataatatcgtctgcgcacagcctcacggtgtcggtcggcttcttgcggtatcgcttcttcgtctgttcctcccttttcctgcgctttcgctctcccttgacgatggggacgagtgtaacgtgtatgtgcggcgtttcctcgtccctgtgcaggtgagccgccacgatgttctcctttccgaacgtgtcggcgaagtatttcagattgtcggcgcaccactcgtccaaacgcccctcttcctctatccgcttcatgtcctcgtgcgttcccgacacgttgatgcggattgcccgtacttggttgcttccgattttgcgtgtcagccccgcttcttctaatctctgctgtatagccgccgaacggtctttcaccccgtcggggtattcgataagcctgcggttcaggtgcgtgcgtgtggggtcagcgttcttcggtatgatgaaacgctcgatatgtgcggtcgttccgctgtcgctgccgtgcgccttttccatgtgtaaaactacgaaacccatatattcctttcttttctggcttgtgaaacaataaatctgactatctttgagggcggcgaaatgccgtcctcaagggggtgtgcagaggggcttgccccttgccttattggggaattttcagcgatacgtagtattgcggctcggaaaattccctaataagctacggtattttcttcgtaaataccctgcggcgtgccgtctgcttacccatataaccccaccttattttttccctttcggtcggtgggtggcggggcggtcgttttcgttttcaaaggctcttttgcacggggc

SEQ ID NO: 326 - DNA, 2071 bp, Alistipes onderdonkii
  source 1..2071: mol_type = genomic DNA
gccccgtgcttgctttgcctttgtaaacggaaatgattgctccgctttcctctgaaaagagaaatagaccctgcaatatatatcaccatagtgataggtttgcatgctggtatgctggtacgtttgcatgttggtatgttgatatgttggtatgtcatcatgctttccaacggctgttgggcttgccgtccgaaacaaccgacacaaataccgtcgttttctcttttcgcccgtgtataatcctttccaataatgccctgcggactttcgccgccccgaacgattcgatacggaaagcaagggcggctatcgtttcgaggttgtaaacctccgcgctgtatctgtccgatatgcggataatgcgctttatgtcatatatactcaaaactccgcttttgcagagagcctttatccctgcccgaaccgtcggggcgataaccccgaacagttcgcagatttcccgctcggtcatggcggttgcacctatatcgctcggcagggagatattgccctgcccgtccatcgtgataatgttcctttcttctttcatcggtattctgtttttaattagatggctcggcagatattcttctccatgtcctccaacttgtgcgacaaggtttccatgtcttgacttatcttttgggcggtgattttggcgtaaatttgggtggtctttatgttcgtgtgtcccaaaaggcggcttacggtttcgatgggtacgccgtgcgacagaagcacggtcgtggcgttcgtgtgtcttgccacgtggtaggtcaaacgcaccttgaagccgcattgtctgcctatctctttgagtatcttgttacaactgccgttactcggaacggggaaaacatgaccgtcccttgccagtcccttgtatttctctatgatacgcttgggaacgtccaaaagacggatgttcgattcggtgttggtcttctttcttcgggtgattatccaaaggttgccgtcgaagaatgtttgcaggcggtcggcggtgaggttcttcacgtcggaatacgccaaacccgtgaaaacagaaaagacgaacaagtcccgtacaagttcatgggtggcgttcttcatcggtgcgttcatgagcgtctgtatctccgtttgggtgaggtagcccctgtccacgctttcgggagaattgatatatccggcaaagggattaaagggcaatcgtccgtcgttcctcgctatcgaaacgatgtgtttcaacacaatcatatagccccacacggtattggtgcggcatttcttctccgtgcgcaaaaaatactcgaaatcgtttatgaacgtgaggtttagttcctttaacggaatatcctcacgcttgtaggtgtggggcaggaactcccgaatatggttgcagaccgtccgataacgggtaaatgtaccctgcgccctgctgtgcccgactttcttctcgaactcggcgttgtgctgctcgaacagcttcagcaaagtttcctgcttgacgccgataccgagataggcgtctttgagtttggcggcggttacataaccgtccgtctgcatcagttcttggtagcggcggtttacctccacacggattttatctaccgcaaggttgattttctgcgcttcgacgctcttgcccgaagcacggctgtttttcacgtcccacaaccgtgggggaacgtccatcttgcaactgaactgtttaatctcgccgtccaccgtgatacggcacattaaaggcaggttgccgttcggcttctcgctgcctttcttcacgtaaaataataccttgaatgtacttcgcataactcactcctttttttggttacaaaattagttattagtgagttaccgacagctatgtaaaattacgcaaatcacagaaacagaaccatttagcaagaaatccgcacccgttacgggggtaatgaggtggtaactgaactcttgcgctgtttggcttcgaggtggtatttcgttggctctgccccatagaaaaacaaagcgtaacgaacgctctatcagctaattcgctacgctctgcccaaatttactttttcgctatgtgtttatttta

SEQ ID NO: 327 - DNA, 986 bp, Alistipes onderdonkii
  source 1..986: mol_type = genomic DNA
cgcacgggattgtccggcaggaagcggcggctcagccacagcgccaccagcccgatggggatgttcacggcgaagagccacggccactcggcgacggagaggatgcccgcagccagcgtaggcccggcgaccgacgacacggcgacgaccgtggcgttgatgcccatgccgcgtcccagttgcgccttggggtagatgatgcggataagcgtggtgttgaccgatgtgacggccgcggcgccgaacccctgcatcacgcgcgctagcaccagcgtcgggagtgatgtcgaaagggcgcagcccaccgaggccacggtgaagagcatcaggccgccgatatagactttgcggtagcccaccacgtcgcccaatgccgaaaacgacagcagcgagatcatgatggccagctggtaggcgttgacgatccagatcgagtcggccgacgagatccctagttccagcccgatggtgggcagggcgacgttggcgatggcgctgtcgatcaccgacagcgagacgccgaacgctacggccaggatggcccacaggcggcggggcatcggaagcccgtcgtcaggtcgtgcgatatggggtgcggcgttcattgcagggacaaagataatgtaatcgtggctcaattcaaattcggggcggcccgaaggctggttgcagccggatcggctgggttgcgggaaacggctcgccgccggtttcggggatgttactgaccgcacgtagcgtgtctgccgccggatgctgccgcctgccgcctctctccgaggtctgcgttttggcggcacccacgcctccggctgctgcggtgcgggttccggatgccgcggcagtcgtcggtggcggccgtctgcactcctcccttttgtgttttttgccctgtccgtgcggtttctgccgccctcccgtgctgtaaaaaacggaagcccgggattatccgggcctccgtcacacaactatgaaatttgaacttt

SEQ ID NO: 328 - DNA, 579 bp, Alistipes onderdonkii
  source 1..579: mol_type = genomic DNA
tgccgtggccttgcccacggtgagccacgaggcctggatgttccggatattgcacaatacgaggcggctcacggcgatgatgcgcaggtattccagcggcgagaagtgcgtcgttatcccctgccgttcgagttcggtgcccgtcgagcggaatatccacgggataaaggcgatgaaaccgtactttccttcggggcagcgggcctgcaggtcgcggatacgcagcaggtggtctacacgctggtgcggggtctcgatatggccgtacatcatcgttgccgaggtcggaaggccgaggcagtgcgcctcgtgcatcacgtcgagccacttttcgaccgacggcttggcgggcgatatggccctgcgcacgacggggtcgaggatttcggcgccggcgcccggaagcgagtcgagcccggctgccatcaggcggcgcagggtctccagggtcgtcaggccgctgatgcgggcgatgtgcgccacctcgggcgcacccagcgcatgcagccgcagcgtggggtagagcgctttcaggtcggagaaaagccgctcgtagaagtcaatgcgcagttgcggatg

SEQ ID NO: 329 - DNA, 477 bp, Alistipes onderdonkii
  source 1..477: mol_type = genomic DNA
aaagctcacggcacaacggggttacaccttctacaccgggccggagggcgacatgggccacaccgtgcggaattaccccgcggcatggttggcacccccggaactgcacgccgtcgaagggcgtactcacggacgggcgacctacgacatgacgctgcacctgctccgccacggagctcgcatctcccctgcggagcggcgcacggcactggccgaaatggaggcacagatgctcgaaattttcgcggagctctcgctctacgaacgcatcctcgccgtcgaagggctctccgtccgcccgcgctcgttctcgctcaccccgcacggcgaaatttcgcaaaccgccaccgcccgcatcgtaacgtggttttagcatggcgcaccgtcgccgtccgcacggccgcaacccggcccgggttacgggcacgcaacagaacggccggcacgctgcagccggcgacggacaccttcctgcaa

SEQ ID NO: 330 - DNA, 469 bp, Alistipes onderdonkii
  source 1..469: mol_type = genomic DNA
aacgctgccgcccgtgccgcggaacgcgccgcggagaagggcgtgagcgtggcgcattacgacctgcgcttcgccaaaccgctcgacgaggccttgctggccgaggtcggtgccgagttccgccatgtggtcacggtcgaggacggttccctgcgcgggggcgtcggcgaggccgtcacggcatttttcaatgcccgcggctgcgaggtggccgtacactcgctgggcatcggcgacgagtgggtcgagcacggaaccccggctcagctctacgccctctgcggttacgacgaggagggtatcctgcgggcgctgctcgccgcggggaaataaaaccgtccagccctgtttgccgtgctgcggcataaaatctgtcacatgctccctgaaaaccgttcgggaagtgaaaatcgcgatcgtattattggtctccgcgctgcttgtcatcggcgtggcatacggccgtgcc

SEQ ID NO: 331 - DNA, 156 bp, Alistipes onderdonkii
  source 1..156: mol_type = genomic DNA
acaacagccacccgggaaggagtgcgccgtccgccatacggatttatattttaggggtatagaccactttcttggtctcgaagaactcctctccgaagaaccgcggaatatcgtagatataccagcgcataccggtctgcgccagttcttcggcca

SEQ ID NO: 332 - DNA, 139 bp, Alistipes onderdonkii
  source 1..139: mol_type = genomic DNA
cgtttgatgttgcaaatatatagcctactattatagtaagcaacttttttcgcaagaaaagtgcgctcaaaatcagagaaaaacacccattcgcggataactgcgttattttcacacagatattttttgcgcaatttta

SEQ ID NO: 333 - DNA, 100 bp, Alistipes onderdonkii
  source 1..100: mol_type = genomic DNA
ggtcggatacaaggttttcccgataaatacgctcgcagcgaagcgagaggaagatttatcgggaaacggcgcagccgcctgaccttttagccgacgtaaa

SEQ ID NO: 334 - DNA, 2082858 bp, Veillonella atypica
  source 1..2082858: mol_type = genomic DNA
atgcaagcagctgatattaatgatatatgggaacgtatattacaagtagcaaaacaaacactgccgcctgcgatttattcaagtttgagtacttctctcataccgatgagtatagataataattctatacacattggggttatgcagagttttataaaaagtgtcatcgaatctcagcaaacggtaagtaagttgttaacagatgccatcaagcaagtgacaggcaaagaattaaatatggttttattggatttgtttccacaaaaggatgatgttccaacagcaccgcatgtagcagatactttcacagagaatactgcagaaaatactagtacgaacactatagaaaatacggtggtaagtgacgtggacaatatcgataaaaaatcctctaaacctgcaaagcaggagattccatatcaagaggaattttacacaccggtgtacgcagatcctgtgtatatccagcgtaaagaggtggacgagttaattccagatgaaccgatgtttcctgtagagcagccacaaatggtgcaaacgttgcaatctacggatattcctatcgatttgtcatcatcacagctcaacagtgggtatcgatttgataattatattacaggcaatgcaaaccgcattccgtttggagcagcccaaaatgtgtcggaacatcctggcggcgattataatccactctttatctacggtccatcgggcctcggtaaaacgcatttgatgcacgccatcggcaatgccatcgttgaaagatatcctaatctcaaggtgatgtgcacaacgagcgaaaagttcatgaatttattcatcgaatccatacgcaagcggcaaggagagttgttccgcaatacgttccgcaacatcgacgtattgctcatcgatgatattcagttcttagaaaataaagagggcacgaaaacagagtttttcaataccttcaatgaattattggacaataacaagcaaatcgtcctcaccagtgataccatgccaaacgacatggatcaattcgaagagcgcttgcgttctagattccaagctggctatgtggcgaccatggaaaatccagatttggaaacgcgtatcgccattttgaaagccctcgttgaaaaggaaaacaacaagaatcgtaatctcattatcgacaacgattccatcaactacgtggcattgcaattcgatgaaaacattcgcgtactacaaggggctttcaataaactcatcggtactgcatccttagaacaacggaccagcagcatcgatttggagtacacgaagaaaacattatccgatatcatcacgacggaacgggtaacacttatcgacatcgagtccattcaagactttatcagtacctattttaatattaagaaacaagatttgttaggcaagaaacggaaggctcagttcgcatttccacggcaaattgccatgtatttgtgccgcgatgtgattaatgaaagctacccacaaatcgcagcggctttttccagagatcatacgacgattttgcatgcatacgataagattagcaaagaaatcgacaagaatccggaaacaaaacaaattatcctagacatcaaatcaaagctttcatcactcaactaaaacgggtgtggataactctgtggatatgttgtgtataaatctgtggatattgaggaatttaatattttctgtgattatgtggataacctaaaacaaggtatacacatacttatccacaactgtggaaacgcatgaaatctagaaaactttcacatgtacacacattcacagcgcctactacaaatactactaaactaacaaacaaatcaaaaacatattagaaaaccgatctatcgttgattatctatagagcatcaacgaaaatcgcacaacgaatattacaaacaaggagagtatttacgttatgaacatcaaattccctaaggcaaatcttcaaaaagccattaacgttctacaaaaagtatcacaaaataaaacaagttcaaatctaccaggttccatttatataacaacaaaaaacaatcaagtggaactacaaggcaacgattttgaattgggcattaaattaacaatcgacgccgatatcttagaaccaggtacattagtggttgcttctcgttatttccaagaattaatccgcaaattaccaggcgaaacgattcaattaagcaaacctgaggatggcaatacgctaaaaatcacatccggttcctctgaatttaatttagtaaccttgcatccagatgatttctcattggtagaacaaattcacgaccaagattatgtcaatatcgatagtcaagctatgaaagaactcatcgaccttacgaactatgcagcggcaagcgacgatgatcgccctgtatttgctggtgctttgctagaaatcaaagatgcaaacgacaaagaagtaactatggttgctactgatactcatcgcatggcggttaaaaaggtaaccatcgatgaacctgccacatcccctatgcgcgtcatcattccaacaaaggctttggcagaagtatctcgtttattgccaaccgataatccttctattattaaaatcatttggaaccgtacacaaatcgtattcatgttcgaatccatctacattatttcccgtttaatcgaaggcacgtacccagaatacgaaaaggtaattcctgctcaattcgactccagtgccgttgtagaccgcaaggactttgccggcgctgttgatcgcgtatccttgttggcaaaggatatgagttataacgtaattcgctatgactggtccgaagaacaagtgactttatccagccaaaatgctgaaattggtatggcgaaggaagaaattcctgtggaatttaagggcacaccattcacgatttcctttaatggtcgttatatttccgatatcttgcgtcatagcacaggcgataacatccacatgtatttaaaacaaaatggtcctgttgtgattcgccaagataataatccgaactatacctatgtagtaacacctgttcgtacaaattcttaattctgtaatttgtccaccataggaggacgttatgaaacaacaacatgtaccaattcatacggagtacattcaaatcgatcaattgcttaaattagaaggtgtcatcgaaacagggggacaagtaaaaggtcttatcgatgatcaagtactgacattaaatggcaccatcgttacagaaaaacgcaaaaaatgtcgcgttggcgatgtgattggtgtagaaggcctcgatgtggaattcatcgttacgaaagaggaggcataatcggtgagaattaactcactgcaattgttccagtttcgcaactataaggatttaacccttgatttgcagcctgaaatcatcgtcttgtacggtaccaatggggctggtaaaaccaatattttagaggctatttacgtcggtaccattggtaaaagccaccgcacaaatgatacgtcggatatgcttttatttaacgctaatgaagcgggcattgtggtgaactttgagaaaaaggagacaccgcaaaaggttaatatcaagctatttcgacaaggtcctaaggatatccgcttaaatgatactaagatttcgcaaaaggaattgattggtactttaaatacggtcatcttctgcccagaggatttacagctcatcaagggcagtccatcgggtcgtcgcagatttttagatatggaaatatcccaaacgagcgctacttattatcatcaattattgcaatataatcgtttattgcaacaacggaatacattattgaaggaatatcgcggtaaacagaatattcctcttgctgaatgggatgtacaactggcggatatggcagctttcatcgtaaaaaaacggatggaaagtttaaagaaaatcaatttgcttatcgatttgatgaatcgtaaattgacgggaggcctagaaaatctcaccataggctatgaacaaccatatggggaagagggtcatatggtgtacacgaaggaggccttttacgatttactgcaagaggcattgcctcaagatcgtcatcgcatgacgacaagcgtaggtcctcatcgcgatgatttacgattcttttccgatgctatcgatttaaaaaaatttggatcccaagggcaacagcggacggctgtgctttcactaaaactgagcgaattagaattcatcaaatccgaagtaggcgaatatcccgtattgctcttagacgatgtgttgagcgagctcgacgaggcgagacggaacaatttgttgcagttcattcataaacgcattcaaaccgtcattaccacgacggatatacatgattttgaaaatatgcaaggtgttcaatttattcaatgtcaggaggggcacatccattatggaaagccttgaaatgtgcttacctggtggcctacatgaattaggtttactggaacaatttaaactgaatacactcattcatcattggcgtgatgtggtgggccccatttatgctggtcatacgcgcattatcgacatcaaacctccgaaaattgtgctcagcgcggataattcgcagtggatgcaagaggttaagatgaaccaaaaacgcatcctcaaggccattaatgactattataaaagtgatatcatcactgaaatgggcctcatcatgcatcggcagagctatgtgaaagaaacggtgaatactgaaattttgaaaatagacatgcccgatatcgatggctatatcgacatgtcgaaaatcgtcttgtctaatgatgatatgaaatctattgatgctatggttgaaagcttagcagaagatacattaaaagaaccgtttcgaaaggtgctcattagcagccgcaaaaaggaagtctatttgctagaacacggctatcatcgatgcgagcgctgtcatacgttgatgagcaggcaaacaaaatattgtgtatcctgcgaatatgaaatgcatcgcaatcatattaatgatataaaaacacaaattagacgacgtccatatataaaatatagcgaagctcaacaatacattaaatgcacctttaaagacttttccatagctatgcgagaattgatttatttttatttagataaggtctaccatgggtctacgagccgaaaccacatgtacatggccaccatgctcatcacccataaacggcttgaagaactgacagaccagcacgttatcaacttgtgtaataaataccgatcaaaattccttagcgaagaaaaaattaaagagctaaatatgttaaggggtatattggaatagcattaggatgtatgaggtggatagggagtactttcgcagcgactttggccctgcggagcccgtagggcgtagacagacccggccggtggagcgagaaagcactccctatccacctcaaaagaataaggagatttatgtacttacatattggcgataattttagtatccctatgaattcaattcttacgatgattcatgcggagtctggtaagcatcataggacgggcatttcgcattatgacgcagaggttatatatattgtgcccgaggataaggtaaaaacgtatattgtaacagatgatggtgtgtatgcatctggtatatcacttaaaacgcttaaaaaacggattgatgagttttatatgcttttaagtagcaaattatagggctttcacgatataagcaatctatagtataataaagagataatctagcaccgcagatgtgttgtgtattagcatattgcggtttatgtcgttaggaggagtttgtttaatggctgaagaaaattatggcgctcagaatatacaagttcttgagggtctagacgcggtccgtaaacgcccagggatgtacattggtagtacgtccattcgcggtttgcatcacctcgtttatgaagtagtagacaattcagtggacgaagcgctcgcagggtatgcgacgcatatcgaagtatccattaatgaagataatagtattaccgttgtcgatgatggtcgtggtattccaacaggaatgcatgagtctggcatgtctgcggtagagttggttttaacaaaattgcatgctggcggcaaattcggcggtggcggctataaggtgtccggcggtcttcacggtgtaggtatttccgtagtcaatgcgttgagtgaatggactaaggttcaagtatctcaaaatggcatcattcaagaaatcgattttgcgcgcggtcacaaaacatctgaattgcacgaaatcggcaaggctgaaggtactggtacaactgttatttttaaacctgattctgaaatttttgaaacgacggtgttcaatttcgatacattgaaaattcgtttacaagaattggcattccttaacaaaggtcttcgcatcacattgagtgatttgcgccaagaggaacctcgcattgaaagcttccattacgaaggtggtttaagttctttcattacattcttgaacgaaaacaaggaagttgttaacccaactgttatagacatcgaaaatacaaaggatgacgttgtggtagacgtggcgttgcaatacaatgatagttacagcgaaaacttgttgtccttcgtaaacaacatcaacactgttgatggcggtacccatttatccggtttccgtgctgccttgacgcgtaccctcaatgattatggccgtaaatccggtttaatcaaggaaaatgaaagcaatctttccggcgaggatgtacgtgaaggtttgacagcggttgtgtctgtgaaagtattagaacctcagttcgaaggtcaaactaaaacgaaacttggcaatagcgaagttaaaggtattaccgatgttatcgtatctgaaggtcttaaaacattctttgaagaacatccacaagatgcgaagaaaatcattgaaaaagcaacgatggcaagtcgtgctcgtgaggctgctcgtaaggcccgcgacttaacacgccgtaaaaatgcgttggaagtatctagccttcctggtaaattggcagattgctctgaaaaagatacatctatgacagaaatttatctagtcgaaggtgattctgcgggcggttctgcaaaacaaggtcgcgatcgtcgttaccaagcgattttaccattgcgtggtaaaattcttaatgtagaaaaggcgcgtcttgataagattttagcgaataacgaaattcgttccatgattaccgcatttggtacaggcattggcgacgaattcgatattacaaaatcccgttataacaagattattatcatgacagatgcggacgttgacggcgctcacatccgtacattgcttctcacattcttctaccgctatatgaaaccattagtagaagaaggccatatctacatcgcacaaccgcctttataccaaatcaaaaaaggcaaatctcattggtatgtgtactctgatgcagaacttacagctaagcttgatgaagtaggtcgtgatggtattacaattcaacgttacaaaggtttaggtgaaatgaatcctgaacaattatgggaaacaacaatgaaccctgaaaatcgtacgattttacaagttagcttagaggattctatcgaagctgataaaatctttacggtgctcatgggcgacaaggttgaacctcgacgtaaatttattgaagacaacgcaaaatatgtgcgcaatctagatttgtaagaggtgacccatgacagataatcagaatactaacgtagagtatacttctaatactcaaaaacatttaaaacgatccctcaaagcgcgtcatatgaatatgatcgccttgggtggtgccatcggtacaggcttattcgtagccggtggtgaagtagtaagtacggctggtcctggtggtgctcttgtggcctatggcctcatcggcatcatggtatatttcctcatgacatcccttggggaaatggcgacgtacttgccgattccaggttctttcggaacctacgcaaaacgctatgtagaccctgcctttggctttgccttaggttggaactactggtttaactgggccattacattggctgccgaagtactggcaggggcgctcatcatgaaatattggttccctgacataccggccatcgtttggtccgcattattcctgttaattctatttgggcttaactatttgtccactcgttcctttggtgaaagcgagtacgtattctcgtccatcaaggttattaccgttttcgtattcctattctgtggatttatgctcatctttggtatcggcggtacatctcctggatttgagaattggacagtaggggaagcaccattcgtaggcggttgggaatccatccttgctatcttcatggtggctggtttctccttccaaggtactgagcttatcggcgtagccgctggggaagcagaagaccctgaaaagaacgtgccaaaagcgattaactccatcttctggcgcatcctattgttctatattggggctttcatagttatcggtttcctcattccttatactgatccaaatctattgaattccagtgtagaaaacgtatccatttctccatttacactcgtatttgaccgttttggattcgcgtttgcagctagctttatcaatgctatcatcttaactgccgtattgagtgctggtaactctggcctctattcctctacgcgtatgctttacgcactcgctaaggaaggtcaagcaccacaaatctttgcaaaactcaacaaacgcggcgttccagttcctgcattgatattgactacagccattggcttgtttgcattccttacaagctttatcggcgaaggtacagcgtatacatggattgttaacatctccggcctttgcggtttcatcgcttgggtaggcattgccatttcccattatcgcttccgccgtgcgttcattgcacaaggtagagatcttaaagaattgccttacaaggcgtggttattcccagttggtccaatcttggcgttcatcctatgtgttatcatcatctgtggccaaaactactccgctttcacaggcgataccatcgactggtacggcgtatccgttgcatatatcggattgcctatcttcttcgctgtttacctaggttacaaatacatcaacaaaactaaactcgttccgttgaaagaagtaaacctagatcgcgattttgataaataaaaacgcaataaaactagacctgttcattatgaaagtagtgaataggtcttttttttgtacatgcagtattaggttattgtttttatatgaaagctatcattatgagattgtttttctataaaagccttgctataatgaatcaaaatatattgtagttaattagagaggatataattatgattattaccacaactatgcatattgaaaataagcctgtacaagagtacaaaggtatcgtatttggcgaagtcgttgaaggccgtaactttgtaaaagattttatgtccggaattcgagatattgttggtggccgcagcggtagctacgaagattccctaatgaacgcacgccaagcagcactcgatgaaatggcaaaacgggctagtaaaatcggcgctaatgccgttattggcgtgtcattccaatacagcaccgtaggggcacaaaatggcatgcttatggtgacatgtaatgggacggccgttgtaatttaataagtggaaaaagctgagcatgacttctctgctccaccggccgggtctgactacgcccttcgggctccgcagggccaaagtcgcatagaagtcatgctcagcttttcttattaaatataataggctaaatgaaaaaagtcgttcggaaacactacttatcctattttgcttaaatacaccatcggtaggtttagatgagaaaaaggcagcagattttgtgatctgctgccttttagtatgtaataaagggtctcttaagaaatagaacaggcgtgttctaatttaagaaaggtgtgtatagtgctttttagaaatagaacaggcgtgtactaattaaaaaaggtgtatatggtgctttttagaaatagaagaggcgtgtactaatttaaaaaaagtatgtatggtgcttctaagaaatagaacaggcgtgtactaatttaagaaaggtgtgtatggtgctttttagaaatagaacaggcgtgtactaatttaagaaaggtgtgtatggtgcttctaagaaatagaacaggcgtgtactaatttaaaaaaggtatgtatggtgctcctaaaaaatagaacaggcctgttctattttaaaatagggatatgtatgtaaggcaatataaaacagcagggctgccaccctgctgttttttctttgttgcgtgaatacattgcaacttatttatttcccttgtcaaagttatattaacattatcagaattagtagtcaatcaattattagattataatagatatctattatatattacttatttaaccttataccatgttgcgtacataactggtagtacgatgagtgttagtatggttgctacgagtagaccgccgctgaatgcgatggcgagtgggctccagaatacggatcccatgagtggtatcataccaaggatggccgcaatggcggttagcatgattggtctgaaacgcaatgtagcggagttgataatggcttcgcgggcagattgtccttcggcgcggtgaatttcgatttggtccaacaggatgatggagttacgaataatcatgccggagagggcaatgatgccgagtatggccataaatccaagtggtgtacgcgtaatatttaaggccagtacaacaccgatgagtccaagcggagctgtaaatagggccataaacataagggcaattctctttaattggaacatgagaatcgtcatgattgcaaagagcatgattggcattggcatgagcaatttttgtacagcagtgacgctcttttcagcagaaccatcgagatcaatagtatagccagttggtaagtcttgacgatattcagcaagtttattgtaaatttctttcgtcttagcattgccgagcacgccaggtcctacattagcatgaatgctaatggttggcatcatgttgcggtgccaaataatgccttcctcttggctcatagaaatcgttgcgatttggctgagcggtacataggaaccatttcctgtttggattggtaatgatgaaagtgccgccaagttgtggttttcattgccgcttaatctgaaagtaacaggaatggtttggtttccttcgtagtattcaccggattttgtaccggataataaactttgtagatgaagcgatacggcataactattaatgcctagcatacgcgctttatctgggtcgatgtggatttgagcaactggctctgtatccggccaatcgaaggcgatattatgtaaatctttatcctcctgcattttggctttcacatcgtttgcaatcgttttaacctcagatgcatcaggacctgatacgcggagcataacagggtatttggacggcggtccgatttggacgaattgcatattgatgagcgccgatggatattgatcgtttagttgatcttgtaaatccttgaataatgcatctcgatcctctaaggatttggtaacgatgatggtttgcatgaaattagcacgtggcaattctggttctaaggtcaatacaaaccgcggtgacccttcgcctacataggtggtgaaatggtcgatatgttcattatcctttaacaaagcatccaatgatttagcttggttttgggtataatcgatggatgagctttgaggaaattgcatggatacgatgatttcattccgtgtcgacgatgggaaaaattcctgtttgatgagagggaatgaaagcaaggacaggatgaaagcccctaatgttaggagtaatacggccttatgatgacctagtgcccagtgaaggaggctttcaaaacgagcataaaaaacggttttcaaacgatgcatgatatgatcgcgacgagtccattccaactcgggtttctcggccttattttcgatgattttatagcctagcaccggactgaccagaacggacgcaatccaggataggatgagggccatgaagacaacaatggacagggatttcgtgaattccgcaaccatgccctccgccaaggcgagaggtaagaagccggcacaggtaatgagagtgccagacagcattggaaaggctgttgattcataggcgaacgtagcggcgcgccagtgattaaagccttcttcgagcttaacgctcatcatttccacgacgatgatggcatcatcaacgagtaggccaagtgccaaaatgagggcgccaaggctaaccttatgcaaataaatgccattttcatacatcagtacgaatgtcgtagacacgacgaccggaatggtgagggccaccacgataccggtgcgaatgccgagggatgcaaagctgacgagcaatactatggcgatggcttcgaataaagattgcgagaaatcgccaatggattccttaacaatgtgcggctgattcgacacttggtcgaggcttaagcctgcaggaatcgttgtttttagctctttcagtttcgtatcgatagccttaccaaattcgatattattggcgcctgcatccatggaaatggcgatgccaatggccggcttgccttcgtagtagaattgaggactggatgggtccttataagtcatcgttacgtctgcaatatctccgagtcgaattgtttggttattgatgcgaatcggcatatttttgaccgcatccacgctatcaaagacgccgttaatgcgtaaatatacattatttgtatccgtattgaccatgccagccggcaccatggcgctttgctgtttaagggccgtcaataattgttgcgtgctcacctggtacgatgcgagcttgtccttgttaatcattacatccaaggacttttcttgcaccccgatgagagtgatcttcttaacgttcggaacggataagagttgccgttttaaattttccgcctgttgtcgtttttcttcgtacgagaattcgtcacctgaaagtgcgtaaatggtgccatatacatcatcgaatcgatcgttgatagatgggccttgtacaccggatggcaaagatttccattcatcattgatcatattccgcgcttcttcccaagcgggacgaatcttgttcgatggcaaatcttctttcagattgatataaatgacagatttgctaccatctgtgaaagacttcgtataatccacacccggcaaatctcgtagtttttcttcgagcttgtccgttacttgatctgacatttgttgcggtgaagcaccgggccatgagacgcccacaaccatggtacgcatcgtaaagtctgggtcttccatacgtcccatatgggtgaacgagaatataccaaaggtgaggagtacagcaatgaagtagtagataatggatttatggcgtagcgcccaatcggctaaattaaacttcttcatttatgcaccgccgttccttcttgtaattgttgggttcctgcggtgatgacgatatctcctttagcgaggccatttttaacaatgaccgaattattaccaaattcgccagtttgaataggaacgagatgtgctttgttgtctcgaatgacatagactgcgttattaccttgtttgtctttcaccaacgccgtcaacggtatggagatatccgttgtatccgtttgattgaggatggcattgatagtcataccgagttgcacctcttttggaggattttgcaaggtaattttgaccatatacgtccgcgctatagggtctggaaccggtgaaatttcacgaacaataccttgtactttcacatcaggcaaagcccaaaatgtgatggttgccgtgctaccagggtgaattttgctcatttcctgttctggcaaagcgatgaccgcctcaggttcgtgaccggccgccaaggtacctattgcctggcctgctgctacgacctgaccggcctcgacattgagagccgtaataataccgctgtctggagcaaccaaagtagtataactattttgattgttactcaaattgagacctgcttgggcctgttgcaactgagctttcgccgcattcagttgattttcagcctgatccaattgcaatttgctgatagcctgctcagcgtacaaagcgcggtatctttcagcattcgtactagctaaatcataggccgattgcgccgccgtaacagcaccttgcgcattttgcacctgactcgccgtgtcagcgccgttaatttgggcaatcacttgaccggcctgcacagcagtgcccacactgacaaacttattaatcacgcggccgcctacctggaacgccagattcgtttccgtccgattcttgatggttcccgaatacccagcactcgtcgttccagcctcttcgccaatcgtaatcgtccgtaccttgaggctcgtatcatgatcatcttgattcgacccacaaccgccgatgatgagtgcactcatcaacagagccgtggtcaaacctaatacactacgattcataatcctctccttcacacacgtaatagagattattgtaaaagcaataactactatgcaatatatattttatacaattaaataatactatatattagataaaaattctataaggatattaattatattagaaaatatatatgttaattaactacaaaggtgtaccttatcccaaagccgacacgctactgcgcttcgcggagcccgaagtcgttttgggacaaggtacaccttttttactgtagatatgaattagctaattcattaacatatatattttctaatattaggaggaggggaccttcggggagaaatttaggttataatagtttttgataaaggttggtggaattatgaaacaagaaaaagacagagaagtatataatcaaaaaacattagaagcaatgaaagaagcaaagaaaatagctagagatttgaaataccctagttataaaaatttagatgaattaaaaaaggctttattagatgaagatcatagaaaaaaagtcactaattgatatctggcaaaggggctctcattgtcccaagcgaaataccatattagtgacttctttgagttaagtatacaaagtgaaaaaggcacatggtgctgccacttcgggtcccgctttagcgcgatagcgtgtctttctcatagattgtgttgaaccaagttgtgcgaattacagtagaaatgaaaatttgagcacgtagtatcataggatattagtaataaaaaaatagacttccaaaaacgactttggccctgcggaggccgtaggccggagtcagacccggcctgtctatccacaatagattatgttaataaagttgtgcaacaaacgtagaatagaagatgagaaaacccctcttgaaaacgacttcgggctccgcgtagcgcagtagcgtgtcggctttcaagaggggttctctcatccatttttattcttctgtttgttccacaactggttcaacataactaaccaaaattttgtctatccgtgtattatccatgtccacgatttcgaatgtgtatccgtcccaactggttttgtcgccttcgcgtgggattctgccgaatagaaggttcataaggccgcccagtgttttgtagagatcgtcttcttctcgtggtagttctttatcgatgtggaagaattctttaaattcgtctacgtcgagtagaccgtctacgagccaagtgccatcttcgcgttcgacaattcgattttcttcttcttgccgttcttcttcgccggatggcatgagacctacgatttcttccatgatgtcgtgcaaggtcacgaggccgctaaagccgccgtattcgtcgaggacgatggtttcgtgaacgccttcattacgtaatgtgttgagtaatttcataagagaaatggactcaggtacgagtaatggttctttcagacaagaatggatgacatgatgcaatgatttttcgccttgtaagcattggaccatcacatcggttacattgactacgccgcgcaattcgtcgagcgagtcttcacctaccggaatgcggtattggttcgccgtttttaggacctccatgatttcttcttcggacgagtttaaatcaatccatttgagttgcgtccgcggtgtcatgacgtcgcctgcgttcatatctgctaggtggaaaatattttctacgaggattggttcctcttcttcaaaggcccccatggctacgccttcggtgagcattttgttaatttccgactctgttacaggcgcttcttctttcacagtgacgcctaatatttttaatagaaaatcggtggacacgccgaggaacagtacgattggttttaatgcttgtgaaagccagtaaattggcttggaaacaacaacggcaatcgcctcagggctgttgatagctaggcgttttggcaccaattcaccgataacaagggataaataggtgatgatagaaacaattaagaaggaactgatagaagccgcataaggagcgatactagggaaggctttcaccaatacgtcagctaatggtgcggaaaaggtggcaccggaatacaaaccggtcaaaatgccgacgagagtgataccaatttggatggtagagaacatctcgttaggattctccgccaactcaaaggccttcttggcgcgctcattgccagactcggccatctcctcaaggcggcgcttcttggcattgacgatggcgagctcggtcatagaaaaaatgccgttcgcgatgattaaaatgacgataattataaaatctaaggtcagatcactgtccatgtaagtaaatactcctttttatgagatacaattctgcacatgagaaaattgaaatattactctttagtatatcatattagaatcatatatggtaaatagcgcaaaaagaggaggggtgccaccctcctcttttgttttgcgtgcattaaaatgctaacaaaatacttatttccttaatagtgtctatcatagcaggtgtaacctgtcactacatctgcaagtggctagatagatattttcgtcagtaactagcacagaaaaaggagggccaccaccctcctttttcgtttgcgtgaaaatgtgtcacacattggttcctttgtcacttattatattacacaatttactattatttgtaaatggttagtgattgttataaaaaagcagggttgccgccctgctttttcattttgcgtgcaacatattgaacgcattaacttccttgccatatactacatgattatctaatgtttgtaaatgatgcaatctatgtatacaatgattcataagaacattaataaaactataatatacatgtatataagcaatagggagcaggatacgatgacaagcgaacaggaatgggaacaagtgttacaaattaaaaccacaggccgtgatgatagccgttcggatgcagagcatcatccttatgagccaacggattattgtgttcttgaacgccttgccaatagtggttatattacgaaacaaaataccctcattgattacggcagtggcaaggggcgcgtcagcatatttatggcgaatcagacgcggtgccattccattggtatcgaatacgatgaacgtttgtatgaacgggccatcgtaaatggtgaaagcccagctgccaagaaccgtgtatcctttgtcctaggcgatgctgctacctatacattgccagacaatgcagatcgatgctttttctttaatccctttgcacttcgcaccattaaacgcgtactaggtaatatctttgattctttatatcatcatccaagagaaattctactattcttctattatgttaacgaagaagtagagaatttcctaaataaccacgtgcgccttgaagcagaagaatcaatacaatgcggtgatttatttcaagaacgtgatgaaaaagaacgaatattggtatatagggtgaatgtgttttagtaaattgattcatctaaaaaaatagcagggctgccaccctgctattttttcgtatgaaaacattgcctcatactaatttcctttgttactcatagaatagcatgatataaaaggatagtcaaattttacgtactttcactaaaacacgcagaaaatccgcatattttctgatataataatagattagagagtataaaaatttattttttctattcaccatggtatgtattgattcgtaatgattaatcatagtgattagggctgagtatataccataaaggaggaacgtatggaacgcgtgtcagcaagtcttattgaagaaattcgcagtgccttagtagagcgttataatcgcgatcaagagattcagcaaatgattgaagaaatcggcgcagaagaaggtcttaatgaaaaagagctgtttgtcattcatcaagcctatttagaggttaaggaacgcatgcaatatacggcgaatttgatggaattgtggaatcaaattgaggtcgttcaggaccgcatgagcatgcttaattcttatgaaagcttggaacgcgatttgtttggtgatgttctttcctttgataaaccaatgggctatggtacgtcgaatcaagacaacttagattatgcaatggagcaaattaagttaaatgatgtagatcatgacctcgaagatatcgaccttgccaaggaatatccaattgatgatcaagatgttgtttattttaatgagcattcagccaataagaaaactacatctagtcgtgatgacgtcaatgaggataactttgatgacgatgaggacgattttgatgatgaaagcgtattagaccgagatattcgtacgtctttagatccttatgatatggtaaattccttgttgtattccaaacaatccacgggcgataaggataaaactaaacaacaaaaggaaatcgacaagcttattaaaaaacaactgaaacgcgtagaagaagaatgggcgaagctttcaggtaaaaaggataaaaaagataagaaaaagaaagataaagataaaaagaaggacaagaaagacaagcagtctaagaaagagtccgaattagtaaaggaatctaagaagtccaagaaggacaaagagtccaaaaagagcaagaaggataaggattctaaaaaagctaaaaaagacaaggatgctaagaaggataaaaaagctaaaaaattagaaaaagccttgaagaaggagtccaaaaagtccacaaaaaaggactaaccgtagattttataaatgaccacggccagaaaactacggataagggctgtggaaaatgcaagcggtgcaaggggccgcggtgtaggaaatatagtatataaagttggggaatggtatgaatcgttggttgaactggataaaaggcattcaacaggaattaaaagcatttttgttcttttctatcttgtttacgctttttagaatcgtatttttaattatatttcaatctcaattagatacgactacaatgaacagtattttaatgtctttatggcttggttttcggttgagtttgaagaccgttggatcaattgtccttgtaagtttgctatttgctacattgccatctatagtgtggccgaaatggaaggcccaaggtgtgcgcaaggtttggtatggatttgttaccatcttctttacattactctttatggggcgtatcccgttttatacgatattcaattcttcgtataatgcgatgcttatcaatggcaaacatgacgatattcatgccattatcaatacggctatcaatgaatatcatggtataccatatttaattggtggtattgcgttgagcattggtttgacttggctgttggtgaaagtcctcaatacgaaaaccattcaatggatacctagcactaagcatagtaaatggattacaggaatcctcagttttgttggatttggcgtgttattcttattttttcgctttggtggagcttttgggtacacgaattccattagctgggaaagcgcagcacgtcttaattctaatctgttaaatgaaacgattttggatgatgcacaagcattataccgtgtgaaatccattgcgaaacggacctcagaattagaggatattcatttaacgcctgctgagttacatgaaaaaatacaatccattggcggtaatcctagcagtacacgatttgatgaagctttcacaaaaacgataacaacagagcgattacaacaacaaccgcaatctattaatatcattctcggtgagtcttatggtttatggccgttcctttctgaatttaacgaacctggtgcttatcttgtagagcaaggtcgtaagtacgcggctagtccacaggcgatgggtacgcaaatggccttggcccaaggaacgggtacgatgcctgccattattggtttattaacaggaatgccggatacggggatgtatccaaactatagcgtaggtatgttacaagaaccgtatggcctcggtattggaccggttatgaaaaaactaggttataagaccgtattttggtatggtggttttagtacttggcaaaatgttaagaactttgccttagaacaaggttttgatgaattccacgatgcatctgaaatgccgagcaacgaaacaaatgcttggggcgtagccgatggagatatgttcaaggctatcagtacatacatggacaaacatcgtggcgaaaagatcatcaatgtcatcatgactacgtcgaatcatcctccatatagtgtgaatgtgacgaaggaaggctatgatgcggataaggttcgtaagaacttgccagattccattgccaatacggataaacaaatcaatgaaatgggccacatatggtatgcagaccatgtgatgggtgaatttattagcaaagaggaacaatctgatccaacttcattatttgttatcaccggtgaccatagcgaacgctttacctttgctcgtgaacaaagtgctaatgtgttctctacgattccaattattttctatggacaaggcatcaaaaaagaatggctttcaccagaagcattcggcatgagcatccaaatcattccgaccttggcggaactcgtaggtcgcacagggcaaacctatgaagctatggtgccgagtctatttaatcaagggccattcgtgtttaaccatcgtttgtggatggatacaaatggtatttatttagaaaatgagcaaatgccacaagattatgctaagtatatgaaaactatgcgggaactagcggcatggcggctaaaacatggggatagtatccaataggggaatattttaatttatatcattaacaaaatgaactcgatattgtcagggaatatatagggtttgtttacttacaaaaggaactatcatgggtgaacaatttttcttatccctccaacaaaatattaaactattcctctggatgcctatactctgtgctatctttagggctatctttatcggcgtgtaccatccatatgaaacgctaaagggcaagggacatatcgttcgtacttgctttacctttggattttggtggggcatggatatcaacgcctatcagctattgattttgcttgtgcttggaaccttgccgttcttggcttttccagattactacatgatggcagccatcgttttaaatacggtgttgagctgcattatatatgctgcctttgccggtaagatgcagttctacaagcattttaacgatacctataactacatgttgcactatggtaagcatgcggataagaaaaacctcatcgatattttctttaatcaagacaagggttggtgggtgctcgccggattcattcctgtagcggccattagctatggggctagcacattattgtctgcgattccgtccattccgtatcctcattttgaaagcaatatcgcagctggcgctagtgcctttggatatttggtaatctatgtggtgatttactattggcttcattatggtgggaccttgaatcaccgcaataaaccggaatgggatgtggtgccaaccatcgttaaggaggatatcttctttgcaaaggccaccattgacgatttagaggctctcaaattggttcgcaaaacgccgttgacggcggcgcaaatgaaatcggatgaggaactcgtagaggatgtgaatcatcttatgccgtgccgtgattggcaaaccttggataatccattgcatgcctttaaacgcgtagcgaagggtgctcgcattgctaaacctaagcatatctttttgattgttggtgaaagcatccctcagtggtccatggatccgttgtatatgaattttaatatctgtccaggattgcgtgagtttgcggctgatgtgcatacggcgtgtgtgcctaatttcttgccagccggtaatgtgtcacgtccttctatttcaagtctcataagcggtatctacgatagcggcatggaattaaatgaaaaggaaattttttggaacaatacattgccaactgctctggcagcacagataaaacgattaggataccaaaccatttactggtacggtggtaactcatcgagtggtaactttacgaaatacggcaaggctcaaggctttgaccgcattgaaaatgctaccgaattctgtggtcctcaagcaccgcaaacatggcttggcgtatacgatcacgtattcctcgaagaggcggcaaaatgcatcgtagctatggacgaaccaacattccattttgtatatactacgactaatcatggtccctataaattagaagataagtaccttgatttcgatgcacgccgcgatttgcctggcgttggcgatgatattttaaatcgcaaggatggcaataagggcttagcaacctacaaatattgtgataaggccatctttgatttcgtagatgctatgaaagcgaagttcccggatagcttgttcatcgtaacgggtgaccattccaatctatttggtgaatttaataatacatccttcttacaccgcgattatacgatgcgtgaaattcgaaataccgtattttatatgcaacatccagagctttcacaaacatcactacctgcatctatcggcacgcatctaagcattatgccaaccatcatagaggccatcgcgccaaaagggttcgaatattatgcggcggtgccatccgcattcgatgaacaaccggatgtgcatgtaacgccataccaatggatcacaagcgacatggtaggggatgtgctcggcgattacggacaataccaaacctacacggcggaaccatccgaatacatccgcccaatcgataaccacgcgcaggacgcagaatactggcgctccttatcggcatggatgatgaaattttatgctaatgtacaataggggagacatacatggcaacagtaacggtcattattttggctaaaaatgaagaacaacatatgaaagactgtatcgcatctgcacaatttgctgatgaggtgcttcttatcgacgatggcagcacggataaaacggtagagattgctgaatctatgggggcccgcgtcgtacatcatgctatgaatggcgattggtctcaacaacgacgttttgccgttgaagaggctcggtccgaatggattttcttcctcgatgcggatgaacgcatttcgccagaattacaacgagaagtacaagatgtgctggctaagaatgagaaaaaagcatactggattgaacggtccaatgtgttccatcacaataaggccactcatggtgtgttgcgtcctgattacgtgttgcgatttatgccaaaagagggtacgaatatagaaggctttgtacatgaaactatatccagcacctatcctgaggctaaattacatggcaaaatgtatcattatacttacgataattggcatcagtattttaataaattcaataattatacgacattggcggctaagaaatataaggaaaacggaaaatcctgttcctttgtaaaggatattcttatccgtccaagctgggcttttttcaaggtgtacattttagataggggttttttagatggaaaaataggatttatcctatccgtgaaccattatttctataccatgattaagtacgtaaagctatattatttattgaaatccaatgggaaactataacagatctagataatagattctaaataacagatgagtgttagtagagaaaggaaggaccacaatgcgcgtagccattttggaaagcatcattatgcccgccggtcatgaggtagaatttgatcgcatgatcatcaatgaattaaaacgccaaggtcatgaaccggtattgatggtgccggagaattttacctttaaggttgattatggcgttgacgttatctatcttgagggcggagaggtagtgacctatgcaggtgcatcgaaatggaaaaagccgttcttatctatattacgcgaacgacgtcgtcgtgcatggtttacttcggctgctaagaaattagaggaacatcattgtgatgctttgattattcctacctccacgtatcgctatataaaagcactattggatacgcctttaaaacatgcaaaggtgcctgttcactttattttccatggcattggcaagggtgaaaacgtacggttcttaaaacaagcggaacgtgccaatcgatatccgaatatttacctagatgtcattaccttgcgcgacgatatgctgcgcagtgatctaccgcgcgtacgtcctatcttacctcctgtgtttaccccatccacgggtgaaacaccaaccttctctacacatacgccacttcgtcttggctttttcggtcaattccgcaaagaaaagaatattatcccgttattggatgctttcaaaacagctgcttttacgggtcccgtggaactcttggtacaaggggcgacagcaaaacctgaggacggcgagctattcgatgccatcgctgacgaatacaaggacgtgccagggctttcattcctccatgcgaaccttatcggatccgattgggacaaggctctactcgatgtagacgctatcttgatgccatacggtgccgagcggtatcgctatcactggagcgctatgctctacacggctattgggttctataaaccggccttggtatcacctgaaatcaatcctgaggtgttgtgcgattatcatgttggtgaaagcttagatatatcctcagtagatacgattcgcgctggattagaacaattcgtaaacaaaatgattgaacatccagatatatatgaggccggtttggtacaagccaatgaagactttggacataaacggatgattgattcgattattaatgtataactatacaagaatttttggaataatcttttgataatcttttgaaattattatattgatagattagaaaatccaaaaaacatagatagaataagagtttatagaaaaaataatcttttgacaatcttttgacaatcttttgaaatgaaatatgtataagtaaggagagtgtatgtttcaatatataaaggaccaatgggctaatggtcgagctatttatgggaaaaaatcatggcgtgaaacacgacgcgtagtcttgcatttcttgcgaactgtaggccacaagcaagaaatgatggaatataaatctttttttgaaagctacgcaccagatcaacatattttagataaacaagaaggtctctatgagttgatgagccgtatattcttgtttaaagaatctaccttacgtgaacgtattgatgcggtaaagaatcactttacagccttagaagacgtatttacgccagagactatcgaaatgctatataatcctgatgaactaaaaccggaaggattaaaacaaggcattctactatgggaagatgctgacttaaacatgacggcacaccttaactttatgacaggccaacgtaaggaaggtttatttaccattctgttacaactaggcaatcaaggtgtataccatgcgaacatccgcctcggcaaaggtttagaaggggaaccagcattgtggattggcaccattcaagggtataaggatggtcttgataatgcgaaacatattacaaaaaaaatgttcggctatcgtccaaaaaactttatcgtattcttgattcgggaactcgctaaatactgtaaagtgcaatctatgtacgccgtatctgacgaaggtttttatgccaacacacacatggtgcgtggccataaggcaaaggtagctgaactcgatccattgtgggaagacattggcggtacagttacacaagatccacgattcttcaaaattcctttggaagaatacagaaaaccaattgaagaaatcaaatcacaaaaacgtagccaatatcggaagagatatgaattacttgatggatatcaagaacaaattcgggggaatttgaaaccattcatactatgatgtgtagatagcatggatattaatagggacagagtatattgttaaaattatatagggagcttatataaatatttagggatgaatgttagtaattaaatggggttatacatatgtataagcatattatattaagtaggtttggtggtttaggagacatggttatgatgtctccattattaaagggaattaagttactatatccagatacaaaattgactgttgttggggaagaaaatgctaagcaactaatggaagcatatccatttgtagatgagtatcttacatttgataaaacaaagaaaagctcatggcatcttattaaaaaattatggcgctctgatgttgtgtatttaatggatacgctatatcatatttctattatttatggtcttgcctgcataaaaaaacgtgttggattaccacataaacgtaagttttggctcacagattgtcttaaagtagaatcatggatgaatcatgcttttgagcctgttgtatatgcacattttttgaaagaagcaacaggaattgatgtaacgacattacctaattgggatactttcgtatatccagatgctagagatgtagataaacagcatgtaaaagaactgttggaacctttacaaggtaaagactatattgtatctagtttggaaacaggtggatatgccaaaaactggcctaaagaacattggcaaaccttatttaatgaacttcgtgaaatgggaaaattcgttgttcttatcggacaaccatcacaaagttatattgatatcaacttgccagataacgtttttgatttacgaggtaaaacaaatcttttagaagttggagaaataataagaaatgcggaacttgttatcaacggatgtagttttcctgtacatgtagctaacgcgtttaatacgcctgttataggtttatatggttcagagccttcttggagatgtgcaccacaacgtatttataaagatgtaatatctccagtggattgtaaaggttgtgatgttttatataatagtcctggatggtgtgagaaacctttttgtatggatagacttttgccttcaactgtaatggaatatgttaaaaagttttattctgaaggaaaaccattgggggcgtataaattggtaacggggaaatcataatgaatttacaagaaaaatatgaggttagctcaagggatgtctttctcgctagtgcagttcgtaatataaaaggttctagaacatgcccagaatttctgtatagatattcgcttaagaaatatggttttaaagataatttagcaagatattatacagaaaaatattctaatatttctgtcggtaaatatacaaatgggtacaagcatattagaaatgatattatcaaatccattggtgcttattgctcaattgccatagatcaattagttgtacgtaatggacataggatagattatgttacaacatgggactctgaaattccatatttggatacagaatcatttgaacataccaccgtgataggtaacgatgtttggattggtgcacgttgtattattagagatcatgtaacaattggcgatggtgcagttattggttccggtagtattattactaaagatgtacctccatatgcagttgtagtaggagctaataaaataataaaatatcgattcccagatgaaattattcaaaagttattactaatgaaatggtgggattgggatgatgataaaattcgtaagagttaccatttattccatgatcctataaaatttgtggaaaattattttggaggcaaataatatgcacctagaggaaacatttattaagactaatgagcctaaacgaatttgtaatgttttatttggtgcatctgatactccagatattgcatttaaagattgtggaatgtttttgtataatcttgctaaagattttaattggcaatcaacctatgtttattttaaaactagagaaacagatacaaaatggaatgagttgttttgttcttatgttaaacctatttgtattggagatactagcgattataaagaacaagtaaaaatagcaaagatgtttttacaggagaatgctcaacaatttgatgtgattatgttctacaattatggtagcactatatggaaattggcaaggctatgtaaaaaaatcaaccctaatgtaactatatatagcaaattagatatgagtaatggtggttttagtcatttttgcggtaataaatcttttatgggaattcgcaattatgcagaaaaaattaaaagtcgttatgtagatgtttttagtgttgaaacaagatcttattatgaagctttatctaagacttcagtatttaagaatagaataggtcttattcctaatggtgtatctacgctagatgtaaatatatctaatatagatcacttagaaaaagaaaatatagttattactataggtagattaggaactcatcaaaaaaataatgagttattattagaagctattaagttattaccagaagaattagtatgccagtggaaatttatatttataggaccttctactaatgagtttataaaattagttgaagattttaaattaaaaaatcctaagaaagctaattctattataatgaccggtagtattatagatagaaataaaatttatgagtattgtaaaaaagcaaaaataatgtgtatgactagtcgatatgagagtacatgtttggtaacattagaagctatgtatttcggtgcttatccagttattacagattatagtgaatttacaatagatactactgatggcggaaaatatggtactgttgtagaacttgaaaatgttactgctttggttaaagctttagtaaaaacgatgtcagataaagatttagtaagtaaaggtaagaaatgtcaagaatacgcacgtaaaatctttggttatgatgaattagcatctaagctaaactctttattaagaagattcttataatttataaatcatatttcatatctaggaaagtgagagtattttagtgaaaatagcaatatgtttttttggtcatttaaggacatttaaacgctgtgcacctcatttaaaacggaatttgttggaccaatatgattgtgatttatttatgcatacttggtcaacattgaatcatcaaacgataactcatcatgagaataaaaatatagatggtatagtaacagagaaatctattattgatacttatggtacatttaaatctattttgatagaaaaacaaaatgtcgaagatatgggaaatgtaaagattactagtactcaacgtgaaacatcattgtttggtatttattctttataccatagtatgaagagtagttattctttatgtcatgaatattctttaaaaaataatgtctattatgattttattatcatggttagaccggatatagcattattagaaaaattagatattaataaatatatatcttatttaactgaagaagaattggaacgtgcttattttactatagtgggtaatttagcaactataaataatggatttaaatatttaggaggaaatgatttagtttattggggaagaccagctgttatttcatctattatggcaggtactgatagtatcttagaatctttaaaaacgataagagagatatattatcctgaacatgtactattaaatattgtgaatcaacagggattaactccatatgctattgaatatgacaactgggaaatcgtacgttatttatctttgaagtctaagttaaatcgtattattagatttaaggcgaataaaaattatattaagatacagttgtttatgtatttattatataaattattctctattcgtttttctataggtaattttgaaataaatatttgtgcaggacgaccttattcaaaatgatagaaattaagactgttatatttattaactcataattgttttagaaatatatttttgggggaaatatgctaaacattgtattaccaatggctggacgaggttctcgttttgctaatgcaggatatacgctaccaaaaccgttaattccagttcatggagttcctatgattaaggtggtagtagataatttgacacctaagtgcgaacatcgttttatctttgtggcacaacaagcacatatagatcagtatgatttagtgcctaaattgaaatcatatgctaaaaatgttgaaataattggtatcaatggtattactgagggacaagtgtgtacagctttgttggcacaaaaattctttgataatgacgaaccattgatgaatgcgaatagtgatcaatatattgatattgatatcaatgagtatctagatgctatgaatgagcgtgatttagatggcatgattatgacgatgaaagcagatgatcctaaatggtcttatgcgcgcactaatgaagatggatttgttattgaaactgcagaaaagaaagtaatttccgaagatgcgactgtaggaatctttaactttaagcatggtcgtgatttagtacgtgcagctaatcaaatgattgcggatgatattcgtgtaaatggtgagttctatacttgtcctgcttataactatttgattaaagaaggtaagaaaattggcatttatgggattggcgaggagtacaatggtatgtatggattaggaatcccaaaagatttagaattctttttacaacatccggtttctcaacatattaaaatgaaggtgatgaaatgattattttatctcatcgtggttattggaaatctgaggaagaacgtaatcaagaggtagcattccatcgctcatttgatttgggatatggcacagagactgatatacgcgatatacaggggaaacttgttatttcacatgatatgcctcaaggtaatgaaataacatttgaggaactattacaaatcatggatggacgtaacttaccattggctttgaatataaaagcagatggtatggctaatgaaattcttcgtttgttaaagcaatataatcatacgaattattttacttttgatatgtctattcctgatatggtagtgcaattaaaaacagaactaaccgtttttacaggattatcggatatactttcaccagcagtattattagatcaagcggaaggtatatggttagattgttttaattcggattggtatgatagtaaattagtcgatacatatttagagatgggaaaatcggtatgtatcgtatctgcagatttacataaacgtgatgtaaaggaacagtggagtattattaagcagtgcaagcatttggattcagactcattaatgttgtgtactgattatccggaaacggcaagggagtttttctatggggaagaaaataaaggccattctatttgatatggatggagtgctgattgatgctaaagaatggcattatgaggctttaaatcaagcgctaggattatttggttatacaataacaagagcagaacatctatcaatgtatgatgggctttcaacacgtcaaaaattagaaaaattgaccattgaaaagggattgccacgtgatttacatagttttatcaatgagatgaaacaaaaatatacgacacgcatgatttatgaaaattgtcgtccacgttttaatcacgaatttgcattatctaaattgaaagctgaaggatacaagattgcagtttgttccaattccatccgtatgacaattgagatgatgatggaatatgcacgcttagattcatatttagacttcattatttctaatcaggacgtagaaaagccaaaaccagatcctgaaatttatcaaacagcgatgaagcagctacagttacagcctgatgaatgtttaatttgtgaagacaatgataatggcattaaagcagctttagcaagtaatggacatcttatgacaattcgaactgtggatgatgttaattatgatgcgattaaggatcggattgctcaaattgagggggtgtagtatgaatattctatttttaatgggaggcaactctgataaaaataaggaagattatccgttataccttaccgaagttaagggcaaaacaattttagaaaaacaaattgaatctgccgaagcattacatccagaatctattattttctgtatgaaagaaacagaaattaaacaatatagtacggacagtgtaatttctcaattggtacctaatgctaagattataccgattacaggtatgacaaagggtgcaatctgtacggctttattagctagcgaatatgttgatactgacgaagaattattaattatggctattgatgatttcatggatgcatctggtctagctattattaatgagttcagaaacaatcatgctgatgcgggtgtagtatgttttaattcgatacatcctagatattcgtttgtgaaagttaatgctgatggtgagccaactcaattctctgaaaaaacaccgattagtagacatgcacttatttcgttttattattttaaatgtggatctgattttatagcttgtgctaaagatgttattcgtaaagatcgtttgattaatggtaacttctatattagccaaagcttaaatgagatgattctacgacaaaaacacattatggtaaaagaaattgaaagcgcgcaattccatccattgaaaacagaacatcagctagctgaatatattatggaatataataagagcttgcaaagtaaataaataataaaaggcgcctgtgtggcgccttatttgttataagcataaaaaaggatatggttagattattgaataaatttaactatatataggtatacatatgaagattgataatttagacaagatgattggtggttggtttattggtaactttgaaccttccttattaaagacaaatgactgtgaagtagccgtaaaacgatataataaaggcgattatgaaggccatcactaccataaaattgctacagaatatacagttatcataaatggtcgtgtaaaaatgaacggcatagaatatggcactggcagtattattacgatggagcctaatgaagtaacagattttgaatgcttggaagatggcactgttaatgtggttgtgaagatacctggggctaataatgataaatatgtagtggagtgagatttctctattttaatttaattatatttgatataattaaaacaaatgttcgttataaaaatagatggtgagtattaatgtcagataaaaaacaagttttaaaatttcattactattttgttaagtgtacagaaggtaataatcttgctaatttcgtggtagattcaaactgtaagttagagttattattggaaaagttgaaaggcaagaatcatagtgaacggacatggacatataataatgatgatgataatagaattattttacaatcattatcaaaagaggctaatggttattggaagataagttttgttaaggttagagatggagctttaccaggacgattagatgcagatggagattttaaagaaataattcttgaggcggatgaatatattggggaggatatgacgatagtatattctccaaaacataatattataggtatacaaagaaatttttttagtgttagtgcgtcaaaagttgaagactatttttcatataaagaaattgaaaatatgggagatggtattcaatttaaatttgaccctattatttcctcaagaagtatacccaatgatgctattttaagaagttttgagatttcttgttatgatttagataactctagtttagaagatgttattgaaaactatgatacttttggtgctaaacggattactattaaatgtagtatggggacatcagctaagggaaatggattaattgcaagagcaaaagattttattgattatataagggtaatccctaattgtaaaaaagcacaagttacatatcgtaaagatgaaactagtccaatagataaaatagattttttagaacaaaaattagaagatagaatagaaatcatatactctaaaagcaatcctatttctcatgaacgtatttatgatacttttattggtgtatttgatgataggattgatgagatatcaaggggttgatagtattatgtcaaggattaaaggtaagtttaaattcattggcttatttttctttttatatataatattatattgtagattaatatttgtttccgatattatgaatgatccggtaaatatatcattagtaaattctatcatcacaattgttactattctagtaggatttattactactgctttaggaatattaataggtattgttgataatgatgtaattatgcctataaaagcaaggaatcgtattacaaatttaattgagtattttagatatgctatattttctggctttgtgtctattatttcatcagtcatactccttattctttttgatttaaattttaaagctacatttgaatttttatatatacagacttatctaattattacctctatatttttatatagtgctttaatacatttaaagtatacttatagattagctaatattatggtacttatattagaacagttattaagaaagtaaaattataaatttgtctttaatgattaaatataatcctaggaggtttaaatgccaatacgtgactttcctattcctcatatacctgataaattacctattacatcagtgacaaagcagttattaacatcatctgaattcatcaaacaagcagtagcatggcagtcttctctatctaaatttattggttacttacaaaatattcctaatccagatattttaatttctgcattaactatgcaggaggccgtcttatcctctaaaatagaaggaactattgctacgattgaagatgttattaataatactccaacaacagatgttattaagaatgatataaaagagattgaaaattatgtcgctgctattcaatttgcattttcagaatttaaagaaaaacatactaccattactaagaatatgatttgttcattgcatcaaattctattatctgaaaatgttcgtggttttaataaaacacctggtcaatttaaaacagaacaaaattatattgctaatagtgttttaggaaattttacaccgcttccacctcatttaacaaatgaatatattgagaatttaattgactatatgaatgttgctgatgagattacgcctttaattacaatagctattatacatgcacagtttgaaatgattcatccatttaaagatggaaatggacgagtaggtcgcttgcttattcctttatatttatttttaaaaggagctataaccttccctgtgttttatattagtcgttattttgtaaataatgatgcaatgtataaagaatgcttacataggatttcacaatcaaaagttgattcacgggaatatatagatgcttggcgagattggattattttcttcttgcaaggtgttcaggatgagagtatagctcatattagtgctgcaacttcaattataaatttatataaagaaatgatagagcaagttaagaaaacagaacatattcaaataattgattatatatttgataagttacgtgttacgccgattgaagttatagagaatacgcaactgaatagaactgcagtatattctacgttgaagttattaactgaaaaaggatatttaagtagagttggatctgaaagaaaaagcaaatatatatttagtagtttggttaatatattgagttaagtttttaaaataccatttttaaaaacttaggacatgctaagtttctaaaatgctcttttttgaaacttaatgagtactaagtttcaaaaaaacttatttttgaaacttaattatcatcttatataaaaataatgattaagggatagcaataaaaaggtgagtgtaatgcgtattttattagcaaatttaacaaagatggtaggcgatacaggtggccttgctaaggtgacggctgcatttgccaatgagatgcagcgccgtgggcacaaggtgagccttgtgtatagcgatgtgcagacaggagatttttattatcctcttgatgcgggcatcgaggcatatgatttatgtcattatgagggtgaaagtcattctattcctctttggtataaggcaaaacgggagattttgcgtgcttttgataagcgtaaagctcgtggtgtgaataatgagtttacgaagaagtatttattaggtcatcttcagtctgtattagatcgaactaagccggacgtaatcgtgtcatatcaaccggcagcatcaaaggcgttattgctggatttgaaaacaaatattcctgttatcaccatgagccatggcgaccctgaggattattttaatacctatcctgtagaggaggttgaagcggttgcaaagagtacggtaaatcaagtattattgccatcctttgaatctcatattaaaaaccacttgccatatgctaagactgttgtaatcggcaatgccattccacaatatgcacagcaggcggagctttcacaggtaaaagatcgttataaaatcgtatttgtagcgcgactcgataagaatcataaacgaccacatttattgattgaggcatttgcaccattggccgcgaagtatccaaactgggatatcgaattatggggccaagaggaccgcaagatttacaagaaagaattggatatgattgtatccaaagcgggacttggagatcgtgttcattttatggggacgacaaccgatgtaccaagtgtactcgttaaggcagatatatttgcattccccagcgcctatgaaggatttgggctttcactgggggaagcgatgagcatgggcttgccagcaattggctataaatcttgctctgctgttaatgaactcatcatcgatggggaaacaggcatcttatgtgatgatggggtaacaccattgacggaggccttggaacgattgatgcaagatcaaagccttcgcgttaccatgggccaagccggacgtgatcgtatgaaacaattcagccctgaatccatttggggacaatggggaaacttattgaaagaagtaagtaaccgataaaataaaaatgaatgaaaatttcatgaatatttaaatgatatttaatctctatatgatacagtatacgtatatcttgtaaaggtatacgtattatttgtatggaaacatggacacatagggataagcgtattgctttgcaagattgtatagtaattgtttttagtgtaaagaagaggtattgtattatgaaaaaacaattcgcagcaatctttgcagcaacagcagttttgggtgtaactactgcatttgcagctaacccattctccgatgtaactcctgattcttgggcataccaagcagtttctcaattggcagcagctggtatcgttaatggttatccagatggtactttcaaaggccaaaatgatatcactcgttacgaaatggctcaaatggtagcaaaagctatggctaaccaagaccgcgctaatgctgaacaacaagctatgattaatcgtttggctgatgaattctccaacgaattgaataacttgggtgttcgtgttgctaaattggaagaccgtgttggtaatgtgaaagtaactggcgatatgcgtcttcgttatcttggcgctcaagaaaaaaatggccattatgtaactgctgatggtgattacagcaaacattccaaatttgacgctcgtgcacgcgttcaattcaacgcaaaagtaaatgaccgtacagaagctgttgttcgtatgacttctggtgattttgaattgggtgatgctagtagtactgcatctgcttccatcgatcgcgcttatgtaaaccataaatttggtgaacgtgtatctgtgaaagctggtcgtttcgatcaaactatcggtaatggcttgatttatgatgatggttttgatggtgttcaattcaacgcaggcaatgataaagtacaattccaagctgcttacggttatgcagtagaaggtgcagctgaaggccaaactcaattagaaaataatacatttacatatgcaagcatcaaaggtgatttgaataaacatgttaaccttggtggtttctatgcacgcaataataaacataaatttgataatacagatttcaaaaacttgtatggcttcagtacagatgtaaactttgataaagtttgggttggtggcgaatacgttaaaggcgctggtatgaacaaaggtactgcttggacagcaggtatcggttatggcgcatatgaccaagctaaacaaggtacttgggatgtaaaagctcaatacttcaactttggtcaatacatgggtgctgtatcctctacatgggatattgcgtatgatttcggtcaaaaacctacattttatggattcaaaggctggttggcaactgctaactatgcattgcaagacaatgttggtttgactgcatactatggcttcaacaacaaaacaaataaagcaacaggtactaacgataaattatccaactactaccgtgttgaccttaactaccaattctaatctcatagattagtgtagtttaagaatatacaaagggctgcaactagaatgtggtaaaaccacactctgttgcagccttttagtttataatactattaattctgaatcaaaaggtatcttttatatgaaacttccatttacatgtcctcaatgtgatcaagaaaatagagaaaatgggaattttatcccctctattgagcaaagagacgttattataacaaatcaaattacatatgaatatacttgttcaaaaggtcatccatgcttttgtgtactacaaatagaacgctttgaaatgttatataaactagcaattcacgaatttctagaaaataactttagggcctgtgtgattaattgtgcggcagcattagaacgattttacgaattttttttaaaagttgtatttcatcataatgggtatagtagtgagaagttttatgaagaaatttggttatctattaaagataggagtaaaagacaagaagatttatttaaggatacatttattgagttaacctcaatagaaaagccacctgttcttaaagatacgcatcgtaaatttagaaatcatattgttcatcaaggagaatttcctaaaaaggaacagacaagagattttgcggatactatttttaggataattggaattggtttatatacattacacaaatattgtgattcttctattgaagtcataaagcatgaacatcttcaaagacggtttcgatttagacctagcggtaatttacatagtacaactatattattgaatactaactttccatcatatgataagatttggacatcaaatgattttaatgtatatgtaaaggatacagctaaggaacatgaggtttatgaagtttatcttaagcaggcaatacctattttacatatgttacaagggagtactaactcaaaagacttaagagaaattttagtgaagataataatggatgtactggatgataatagtattaacatattattttctttagttaatgagctaatttcttctcgggatgaagatcataagaaataaattttctatttaggcaggaattatatatctctatgtagaaatgggtttttaacagatgcgttttttactgcagtttagttatagcccttttttattgttaaatttaaatatttgattatttatgttacaaaatatatattattcaacgattttttcgttaaataagtaaaattatattgaaaaatatatttgatttatgtatgatgagagtagttggaggtgaattatgttagtaaatattagtgcaagtaattttaaatcatttgataaaacggaacgtttatcaatgatatcctctagtaagattcaaactcatacaggtcatgttcggaaaattaaagatactaaaatattaaagaatgctgttatttatggtgctaatgcatcaggaaaatctaatttggttgaaatcttgcgatttatgcagtggactttgcaacatggattaccttttgaatcaagattatttttttctcgtacaaaagcggaaaatgaacatacagatagtgaatttgagttacaatttacacttaatgggaaattttatgcatatggtttttccgtattattatctgaaggaagaataacgggagaatggctatatgaattacggccacatgggtctgctaagcttttattcgaagtagataatacaatgcctacgttgggatctttaaagctaacaaaggatgctgtaaatcgatttaccatatacgctgaagattttgctcaacaagatcaaaatcgtttatttttaggtgttatgaatcatggtaaagatataaataagttaaaaggcttagaatttttatttgaaatctatgattggttgtgtaaccatattgtaattattacaccgaatacaatcctcaatagtttttcatattactaccaagaaggctcactagaaaaaattagcgagttacttgctgattttgataccggtattagtaatgtggcgataaaaaaaattacacaagaggaattaaaacagtccttaccgatagaagtctataataatttgatagagaaaattaaattaagtactacagaattcaaaggtggcaaattgacgatgcgtagtcatgatacgttttttgctatagactttcaagatatagaacatcccaatatcacaacattatgtttacaccatggtgaatcaccattcgacttttctttcaaagaagaatctgatgggacacagcgtatctttgatttattagatttaatattatctaatcaggagcatacagtatatattatcgatgagttagaacgtagcttacatcctaatcttacgaaacatttcctagaactgtttatggaaactcataagaattctgatacgcaactactatttactactcatgaatcaagcattatggatttaaaattatttagacgtgatgaaatttggtttatagaacgagaccatgaaaactgtagtcacatttattctcttgctaaattcaaggaacgctatgataccaaattgagtaaagcctatttagaagggcgatatggggctataccagtgttatcttctattgtgtccattaaaggagagtaattatgggccttcgagaattttctaattggaatgtacgagatgataaagaagaagtagaacctttaaagaagtatatatttttgtgtgaaggtagtgtaacggaagtagcctattttaagcacttaatgaaaattcgaagaaagttaggcatacatccttttattgatataagcattttagagcgaaccgaaggtgatgtgagtatatccgcacctaaacgattagttcaatttgggagtgagtataaaactagagattcttttgacggtgaaagagacactattgtcgtcgtattcgatgcggatgtttttgaacgtgggcaacctcattactctgatattcttgaaaatgctaagcaagaaaaatttgttgtaggtgttactaatccttgttttgaattatttttattgcttcattatgaaaatggattttctgaatatattgtgccaaatgcttcggaatttttatccccaaaaggattaaagaataaattagcctataccatattaaaagaacgggctggtatagattcaaaaagtaatactgcaataggtaaattagctgagtttgttactattgctatagaagaagagcgctttttgaatcaagatattaatgattgcaaaggtaaaattactagtaatataggtcaaattattgatgacatattacatgattctgtatgaataaaaacatgtgatatataatctttatgtaatgcattataaggctgtcctaaaatgtgatttaatcatatttgggacagcctttttcgtttcatatttgcttaaaaatgaaaataatatgaatattttatgttctgcttatcgattatttatctctcattgttatactagaaaggaatagtatagttgtgtgtttttcatatagagggaacgagggtacttatatactgattcatgcgactatagcgtgtaacatatagtttctgtataagagaggtattttatgaaacatcaattagctgctgtgttggcagcgacggctgtgttaggtgtaacgactgcgttcgcagcgaatccattttccgatgtaacgccagattcttgggcgtatcaatctgtgtctcaattggcgaatgctggtattattaatggctatccagatgggactttcaaaggccaaaaggacattacccgttttgaaatggcacaaatgattgcaaaggctatggctaatcaggaccgcgcgaatgcagagcaacaagcgatgattaatcgtttagctgatgaattttccaatgagttgaataatttgggcattcgcgtcaatcgcttagaggaccgcgtaggcaatgtgaaagtaactggagatgtgcgtttgcggtatcttggcactaaagctacgagcgatgggttcataagaacccaaggggagtatagccaaaagtcccaatttgatatgcgtgcacgtgtccaattcaacgcgaagattaacgacaagacggatgcggtagtgcgtatgacgactgattctattgaatttggtgatacttacgatgataatacaggtgaaatgactggggcagcttacatcgaccgtgcttatgtggatcatcgattcggcaaatatgtatcggcaaaggtaggtcgttttaaccaagttatcggcaatggttacttctatgacgatgcgtttgacggtgctcaaattaacatcggcaacgataaaattcaattccaaggggctcatggttatttcttaaaagggatgtttaccaatacctccgcagatatgaatgataccgttacctatgctagcctcaaaggtcagccaaataaacatatcagcatgggcggtttctatgctcgcatgaacgcaccatataatatgggcttcatatttagaacgttctatggtttccatactgatattaattttgataaagtttggattggtggcgaatggttgaaagcagcccatacggaccacggcacaggctggactgccggtgcaggctatggtcattatgatatagctaaaaagggcacatgggatgtaaaagcccaatactttaatattgatgagaagatgggcgctgtgtcctctaaatggaaccttgcttatgattctacacaaactgaaagtagtggacatttatggttccacgggtataaaggctggctcggtactgtggactatgcattgcaagacaatctaggtcttagcgtatatgctgggttcaaaggtaaaacaaaatctgaacttgctagttataagcgatccttggctaactactaccgcgtagagttaaattaccaattctaatcaaatagattggcacaacttaatacaatgcaaaaagatggcgaaataagatggcaaaatgtatatttcgtcatcttttttgttatatttgcggtttttctacaggtgttgagattacctttacaatcctatgaaaatccaatgaacttttctctgaaatataaaatattttttatagtatgttatacttatgttatattctgcatataacggttatcacttataaggggttagggagatacgtgttagtagggccgaattgcagatgtgtatagttctttttatgttgagagaggtatagttatgaaaaaacaatttgccgctatctttgcagcaacagctgtgttgggtgtaacaactgcgtttgcagcgaacccattttccgatgtaacccctgattcttgggcctaccaagccgtgtctcaattggctagcactggcatcatcactggctatccagatgggactttcagaggcgaaaatgggattactcgtttccaagtagcacaaatggtagcgaaagcgcttgctaaccaagatcgtgcgaatgcggaacaacaagccttgattaaccgtttggctgatgaattctctaacgaattaaataacttgggcgttcgcgtggctcgtttagaggaccgcgtaggtaatgtgaaagtaaccggcgatatgcgtcttcgttatcttggttcccaaaagaaagatggtaactatgtaaacgctatgggcgattacagcaaaggttcccaattcgacgcgcgtgctcgcattcaattcaatgcaaaggtcaatgaccgcacagacgctgtcgttcgcgtaacttctggggactttgaatttggcgatgcgactaatggtggcaatgcaacggctactatcgatcgcgcttatgtaaatcacaaatttggtgaacgcgtgtctgtgaaagctggtcgcttcgaccaaatgctcggaaacggtttgatttacgatgacacattcgacggcgttcaattcaatgcaggcaacgataaagttcaattccaagcagcctacggctatgctgtggcaggcgcttttgacggtttaactaagaaatccaacaaaactttcacctatgcaggcgttaaaggtcaacttaataaacatgtaaaccttggcggcttctatgcccgtagaaatgcgcacaaatctagtggtgacgcacttagaaacatgtatggctttagcacagacatgaactttgataaagtttgggttggtggcgaatgggtgaaagcagccggcgtttctcacggttctgcatggactgctggccttggctatggtgactacgaccaagcaaaacgcggttcttgggacgtaaaagcacaatacttcaacttcggccaaaacttaggcgctgcatcctccacatgggacatcgcttatgatttaactaatacagcttgggccacagttgcacctggtataactactagtacaatgaattaccaaggcttcaaaggctggttgttaacagctgactacgcattacaaaagaacgtaggcttaacagcatactacggcttcaacaacaaaacaaacaaggctaccggcgataacgaaaaactttccaactactaccgtgtagaccttaactaccaattctaatctgatgattagtatcgttcataactaacacaatccccttgatgagtatctaggtacttatcaaggggattttaaattagaacacgcctgtagtaattaataagatagcctgatatagtgtctctagaaatagaacaggcgtgttctaatttgtaagatagcctgatatagtgtctctagaattagaacaggcgtgttctaattagtaagatagcctgatatggtctctccagaattagaacaggcctgttctaatttttaggagaggtattaaagggcttcgtcaatactacaggcctgtactaattttcagatgagatattaatagaacaaggccttacctctagaattaatatatctcctcgtgatatattacagataagtagtattcttacgttcatatgtataaggagacactctatgtttaacttttatactgagttattattacgtttacagaaacaatttgtatctgaacatgagtctgatttcaaaccttttgaggatttgatagaagcatttatgactcaatataatcgtggtgattttaatgatacgatagaaatgaaattacgtgatttatacgaggctgcaaaagaggctgatacgactgaggaatcaaagaaattctacaataagattcttgcgttatgtcctgatgaagtagatgctaaacgggaacttatagctcttgagttgcatccaagttttcaacttcatcagctaaaacagctagtagaatcgttgaaaaaacctaagaaaatggattggcatataatcgaggctcgtccttatatgcgctgcctcatcgacatggggatgatatatttagaatacaatatgtataatgatgcaattgcatgcttcacccctgtctttcacggggacaagcaagaccattcaggattccttgtgtacatgatggttgcttgttgtggcgcggccgactggaatcgtggtcgcaaggtgtatcagcgctatctcgcatgttgcgatgatatacaaaatgcatttaatcaggcaccggatatcatgttgccgatgcatatgttgtatattttattggctttgcagtgtggtgaaagtaagattgcccatgatgtattagcagatcttgttgacgaatatgaagatattgattggttattacaagatgcaacgcggtggaacgattttgtggaagaccacttagagaccattatgtatatggtagaccaagtgattgatatagattttgatccacgggaattaataagcttatatactgctatctcatttttaccgactcaattggtgagttttgaaagcccattatggcagactttatatgatgcgtatgaatgtgttaccggtctaattgttgtgaatcggtactctaatgatagttatataggaaaatgcgagacagctcatatgagtaccgtagaggttgctaaaggtggagctgtgcgtagcaatccggtatatgacaatatacggtttggtgcacaaattacactttcacaagccggcttatatacagtagctgattttaaaacagttactaaacaagaagtattgatgctaccaggcattggtaaaaaaacggtggaacaactagagcataatggcgttatatttaaagcgtaaaatgtgacttgagctcactagctatcctaggataacgaagggctatttgtcttttccataactaaaacaatccccttgatgagtatctcggtacttatcaagggaattttaaattagaacacgcctgtagtaattaataagatagcctgatatagtgtctctagaaatagaacaggcgtgttctaatttgtaagatagcttgatatagtgtctctagaaatagaacaggcctgttctaatttttaggagacatgttaagaggtccctccaatactacaggcctgttctaatttttaaagggtatatacgaaggtttggaaattactacaggtctgtactaattttatttctctcatatttacaaacgacaaactataaattataatttaagataatttatagtttatttatattgtgagagtgagaggatttttatgagacatgtaagtaaagcaaagctatcgttagctgtggcactggcgattgctggatctgtaatgcctaatatgatggtagatgcggcttataccgctccgtatactgataatacagatttcgtagctaacagtgatgatatgatacgtgtattcccagaatacgataaaaatatatcttctatagtagcgaatggtggtatggttattattgaagacgggtattctaatattggctatggtcatagtgcatttgctaccagtaaaaatggtggagacattaaattgaaaaaaggtgtatataattctggtagagtgaatacacctgttgcccttgctcaagggggcacaattaatataggcgtccatgatcatcacggcgaatttacgggtgataaaatattcgttcaaggcgatgttatagttaaacatgatccaattcatagctcaaccattaatatcggtatagatggtgaggaatccaattggtctgggctagctttcaatttagctgatgaaaatgacagaaaatataatcatatcaatgtgttccttggtgaaagaggggcttgggagctattatatcaaggtggacttgatggtactaaccttgatagtagtactatgcctagccgtgtacatcgactcgttggttctacgaatcgaaattttcaaaatatagtagagcaaaatgagcataataaactgtatattgataagctcgaaggccatgtgaattttatttatgatcctaatgatgaatatgcagataccgaagatccagaatatacaccgccaaccacaacatataatggtttaacggctgattccttctggggtggcgacattcatatcacaagtgcagcccctaatgctggcgctcatctatacaccagccgcaaagggctagatttgtctactgaggataatgtaaataaggttttagataatcttgcacataaggtgtattatcataactatgtgactggtgaaagaaaccttgaaggcacagtagccattgcttctgaaggtgctgaatctggtcgtttcaaggtagtaacgtctggatatgctaaagaaggtgctattacatggcaagcggatcaaaatggtcaaggtaaatatgtgtacggtaatacaacagtaacacctacaccgcaaccagtgccaacgccaacaccggcgccacaaccggcaccaacgccaacaccggtgccacaaccggcgccaacgccaacaccggcgccacaaccggcaccaacgccaacaccggctccacaaccggcaccaacgccaacaccagcaccgcaaccggcgccacaaccaacaccggcaccacaaccggcgccaacaccagcaccgcaaccggcaccagcccaatcaacggcatatgatactcctcatatgcgtggtgctcgttctgcgattatgagcaacatcaacggctggcgcacattaacaaatacttaccgtcctcgtgcattgcaacaaggtgcaacaacaggtatttgggcccatatcggtggcggtcaatatagctatgatacacaaggtattgataccgacacaacctatacacgtattcaaggtggttacgacgctaaaactggtagcggttggaccgtaggcggtcaagtgtcttaccttcgtggccatgatgattatgtgttcaatggttctggcaaagaaaaggcctttgctgttggcgcctatggtttgaaagacctcggccgagatcaatacattcaacttgaatcccaagttggtcgtgtaacgaatactttcacagctcgtaatgaaattggtgaaagcctatctggcgaaacgaaggctaatgcatacactatcggtgctcgctatggtaaaactgtgaaattacaaaatggtgtatacatcgaaccgcaagcacaattgagctatactcactttggtggagatagctttaatgcaggcaccatgcatgtagaccaagctggcgtaagcagcacttctggcggtcttggccttgagattggtaagacctttggcgcaggcagtatctatactcgtgtcggcgttaaccatgccttctctggctcggtaaaaactacatacacaagtggttctactgtgaaatcaacagaacaagatcttaaagggacatggactgaccttgcattcggtggccgctatggcatcaatgctaacaacagcctttacgctgatattagcactggtttatctggcgactataaagcaggctggtctgtgaacgctggatttacacataagttctaaactatgtttacctaaaataatttgaaaatatagtctatatataaaatagccccagagtactaatagcggtttatattagctgttagtactctggggcttttatgaatatggtctctccggaattagaacaggcgtgttctaattccggagaggtgttaaggggggcaccaatactacaggcctgtactaatttatgaaacattatatatgtattgagttcattcaaatttgacgatatatataattatctttataatataagaagatagtcgggcgagtagatccgtcaggctcatctcaataagtacaaaagtgatgaaatggcctttcagttacctagctattttaggataacgaagggctatttgtcttttccaagacaaataagagccacaagtgcaccaaaggcaataacaacagtcatcacctctagaattatcatgattaactcataatcactcatagagcacccctccctccattaacgaagagaggcccaacctcgtcgactatcttaaactaattataatgcgaacatatgagttgagcaataagcatctataaatacagatatatgaattaaaggaaaataagaattttaaattagtatagacctatattaattagtaagatgagtttgatatagtgtctctagaattagaacaggcgtgtagtaatttttaagatgagcctgatatggtctctctagaattagaacaggcgtgttctaatttttaggagcagtatcaaaggggcctatcgatactacaggcctgttctaatttttaggagaggtattaagggtctcagccaatactacacgcctatactaattccaagtagggatgtcagaggaacgcaatctcagaaaatgtggtataataagttgttaaatcgtatacaatcatttgatgaggaggcctcatgtttcaacgtatatgcgcagtggctatgtttgtagccgcgctgtttatatctgttatacccaatgccgatgctcggcaagatatttatgctttcacctataatggcaataattggtatgtggaccgcgattcaattgaccgcagcaaaccggacgggttgctacatttcacggtatataccatgattggtttgcgttatgatgtggccagtggcagtgagtattacaacgcagatgtgtattattatgatcaaaaattgtctaccgaaggtggtcagttattatatcgcaacccagggattttggcggcggctcgtgtggcacgtcaacaaccggatgcgcctaaacaagcaccaaaaccagtggtagctcagccagcagcatctcaatctatggcagctcaaacggcagctcaatctgcagcgccgacggcaccgcaaccaaatatcgtcaaggctttatcgacaccggttcaagcccctgtacctgctaatggtcctgtgaaagtaaacactcaaatacctattgtattaccaacaggcccagtgaaaaaggtggcggctaaaacggtgatgaccttccataatacatcgaaacaaacgacaggtacgacatctgaatccgatgaaacagaggctaatcgtactcgtaaataatcttaaaaactgcaatttagtcttatgtatactgagaatgtatcagttacagtatatatgactaggttgcagtttttattttgtatatatgagactgtctaaagaaatttctaacttgtaatctgtatgcattcctttctattaatatgcggaattggcaaatcagcaggttgaaaattgtggacttttaatgaggcattaatgaaatagatggtatataatagaatgtataaagtgttaacaatagactgatgactgggaggacagaggtctaaccgtaacttgattgtatttgagctgtcaatagagggtagagagagatgaagcagttcgtaaagaggctagcttgtggtgttttggcgatcgtcacgatgggcaccattgtagggtgtagtcgagaggagccgagtgtgacaacaaattctgatcgtgcgcccgtagggtataaggcgattgccgccatgaatgcgtcggctgcggaaaagtcggaccgcagtgtgcgcactatgtcacaagaggataagattggtcagttaatgtgtatcggtctagaaggcactacatttgacgagtcacaaaaagaattagtacgtaaatatcgcgtaggcggtattgtattagataatgataatatggaatctaaggaacaagtgcgggctttcacaaaaggcatacgagacactgcgaatacgtcgagtctcatgccaccgttcatcgccatgaatcgagaacgcatgcagtatagacctaatttgatgctaccgtggacggaccctaagctgttatcgaagcagggccttgatgcggtgtcgagtctagcgacgcgcacggccattgagatgcgcgaccttgggttcaatctcaatttgggtgtcatggtgaatacccactcgttttactcgtacacgaacgatgtggaccgggcggcgcgcatcggtgagaccattactaaacgctatgcggcgaatcgcgtgtttacgggataccaatattttccaggcggcgctgattacacggtgccgggcatgaaactagatgcgtcgaaggcgagcctcatggacgatgatggtcgcgtatttgctcagctcatcgatgcgacccgtgacgaacatcctatgattatggtgaatgctgtgaaagtaccctctatcgatgcaaatcatccggtgagtctatctaaaccgatcattacagattggctacggaatgaattgggctttgatggcgtcgtgattaccgatgatatcgaggtcggcgctgctattgctggtatgtccatagaggattatgcggtgcgtactattaatgcaggcagcgacatggttatcgtttgtaagcataccaagcacatcaaggccgttcacgacgcgttgacgcaggccgtagcaaatggaaccatttccgaggtgcgccttgatgaagcggtgcgccgcatcatgctcatgaaatttagcaatgaccgatagatatggcttacacctataaacgttaacaataagaatgtaaaattaggcatagaaactcttttcttgtaatgatgtaccccttttactggacaaccagtacaggggatacatagcataatgggaaaagagtttttttatgtgtaaaaaatgaatttattatctatttgttaaaatttacaagatatattttatagtttatttaaattatgatataataaactcctgagaactattttaagggaggtgagatcttatatgaaatgtagtaaccatgaggtggtcattgacgccataatggaactatacaatcaggaccgcatggaaatgagtgttgtacacggtccttacagcgttggtaaaacgtatatcgctagagcattacaggctcgattaggcaagggtcataccatatatctgcttggacgcttggcgaatgagtccattcatattcgatcaattgagagagaactaaaggtgccatcagggtcttttaagactttagaggatgcattgcgtggcgtttttcaagcaagtcttgacaagcggatcatgctcatcatagatgattatccttcatttgtggatacggttccacaagcgcctatcatattgcgtgacttgatggaaacctatcgtgaccatggtaaagtattcgtactcctcatgggaacccatgtggacgaattaaaagggcgaatcttgggcgaatcaagtttgattgcagcctacattcataattatttcaaggtcaatccgttcacacttgatgatgtgagagcattaggttgggactatacggacgaagatcttgttaagctataccatgtaacaggcggtatgccggggaatctcgtgcatatagatcccgccttatcggtagatgaaaatattgtgcgtctattctttaaaccacaaggcatattatgtacggaaccacaacgattgcttatgcgctacattcgtaatgtaggcgccgctaatgcgattctctatgcgttggcacaactggataagccgttctatacagaattatgtcatgccagtgagcttaagagtggtacctttgcaacccgtatggccgacctcttagatatggaaattattggacgtattcaagggggtagccgtggtccattgcgttacgcagattaccattttgtgaatactatgttccaattttggtaccagttcgtgttcccaaatcttgaggaaattaattgcggtcaagggcaatatatttacgataccattgcaaaacctgcgctagatacactcgcttaatacaatcgttttagtgaaatgaattcgaattcgtgcgacttgtaattgattcgaactcgctcattgtacagaaatcgattcgaattcatgcagctatgtaaaattgatctaaattggcgtacttttctgaaataggtttgtaattatacacaaatacatatgtaacaacaaaaattccgctgtaaatgtatgcatttatggcggaatttctcatttgtctaaatactcaattgggtgtatattccaagtaagcctaggcagaaaggaacgaatatgaacgtaaagcatgtggtttgtccccaaaaggtgttacaagcggtgacagaccttagtttagtgcgcgtctgccaagaacgtcgtgtatcggtactcagtacggaacgagccgtgtggcctatcgaggaattgactatcgatgcggcacaaatcgagttatgccggcgctatcggccgcttatcatgcggtatgcgagccgatgtagtacggctgtgatgacggatgacgtcgaatcatttctgtggatcatctttatcgaatccatctatagctttcacacatcgggaaaggtaccattttctggctatgtgaaagcagctattcattatggttatcttaatttttataaacaatcagttcatcagtggcgccacgagttgaccttgcctctatgcactggtgatgatgtatcagagccagcgatggatcagttccctagcgatgtggatcttgaacgacatattgtcggtacggtgacagaagacgaattgcgcaatcgtctgtgggctgctttcagaaaactgccacggcagcaacaacagttattgtatgccctatatcgagatggcaagagttgcgtagacataggctgtgaaacacatcagtctagacaggctgtgcaacaacgccataaaaaggccatcgaccaattgcggtactatatgatggtagcggataacaaagaattcgatatgcaagatatgcaaaatatgcatagttataagtaactttaaaaaatctaaaatattttttaatttatatatttacagtttgtaattataggtatacaattaactcataagtgctgctaaagcacctactataacacgtgttatttataagcttttacaagaggaattccttattttattactgactatttattaatcttacagaaaggttaagataatgttgaatacaacgtgtgcaaatgtaagtaataacgaattaatttcttgtaacccaaatgcaatatatggcgatgtagatcaccatatatgttgcttgatcccaatctatattgacggcggtgattgtaccgcgtgttactatgtagatggtcggcgtgaaattatccataaatccattaagatggtattgagagaagtagcgcaccacgagggagttctagcaaacggcattcaatcgtcgaggcggtcaaagccgatgtatacggaccctagaacgatgagtccgaacatgacttttgcgagcctgaaatcgcgcaaacccatcgggcgtgatgtggtatatggtttattcaacgttatcattccatttcaataccgcattgagccaggaccagaaccacatacaacgtatatcatcataggagactttgatcctatactcgtatttcattcccctgaccacgtgcaacgtaaactacgcgatgctttgttagaacatctagattatacgaaacggatactcgccaaattgagtacctgcgggaacccttatgtggtggctgaaatttatggtgcctcgagaacgctagcgggagtatagcaacacattttgaaagtgtgggagggtcgtaatatgaattacgcaacaaaattatgtattgtttcaatgatgagtgtgtttagtgtatcgtctataggcttggtgcaagccgctgatacacctattgtttccgctggtggtgcaacctataatatcggactacagggtgcttctttcaccaattcggataatgtatccttaggtggtcaagctggggcaaccaacagtaatccatattctcattcaggagatccaaatgcaacgggtaataacattgccattggtcgtgtagcattgaatggttctcaaggtggtgggaacgtcgcattaggtgctaaaacatttatggaaggcaaaggagactataatttcttaggtaactttgcggcaggctttaaatcaactatttctgatacaattgctatcggtgctttcgccggttctaatgctaaggggaataaaaacgtatggcttggtgctggccaagcgggtggcagcacaggtaacaatacagtgttgattggctctaactctaatgtaaatggtgatttcaactatggcatgggtcatggcgttatttttgaaggtaacaagaattctgccataggtgcatacaacaagattgaaggtgaccaatctggcgcctttggtgtaggtacgtataatgtggccactgttaagggggataactcctatagcgtaggtaacaagaacgaaattggtgccaataacacattcgtaatgggtaataatgtgaaaacatccctagataatgcagttgtattaggtaataattccactgctgaaagtagtgatgtggtgagcaccccaagctacacttatgcaggtggcaccgtaaactttgccggcactgcaccagtatccaccgtatccgtaggcgctaccaatcaagaacggaccatcactcatgtagcggcaggccgtgtaagcgcggattctacggatgctatcaatggttcccaattatatggtgcgaaccaacaaatcgataatctatataacaaaattagcaacattggaaaagaggctaataaaggcgatgctcgtgctgcggcactagctgcattacatccaatgcaatttgatccagataatcgggtacaagtgatgggcggtattggacactacaaagatgccaatgcgctagccctcggtgtgggttactatccaaaggaaaacttgctcctcacagcaggtgccaccgttagtgaccgcatcatggccaaccttggcgtatcttacaaattcggcgaaaacaaaacattacaaaaaatctctcctgcgtcctataatgctctcgaacaacgggttgatacattggaggctcaaaataaaaagttacaagaaacagtagatatgctcgtacaaaaattaaataatagataatattgagacactcagatagctgtataatataaacagatcattcataaaaacctcagtatataagcggatagttagtccattgcgattagctatccgtttttcattatattaattatcttataaatctgttaataaatttaagataattataaacaaactatttacaaatatttaaaatatgataatataattcatgtaaacatcatgaataaatgatgagtgagagatcgtattatgtatttgtttgtaaatggagagggaagattatgaacaaacggaaacgcttattggcgatattgattaatggtatgttgttatccagtttatgtgtggctagtgcagcggatgttacggtaggtgctggtaatggtattgcttatgggactagcagtagtgccaacaatacgcaagatattgcagtcggtaacaaggcaaaggttgaaaactatgttggtcaaaatggcagcgtagctattggtgccaatgcacatgttgaaaatatggcaggtggtgcagaagcagctgtgggcatggggcaaacatcatattctggaagcttttggtcctctgctcgtgtaccggcagatccatctaaggtagtgggttctgttgcgattggtaataacacatttgctcgtacaggtagtaccatgattggttcccataactaccgtggtgctattggcgatactacgatagatacagataataatggtactcgtggtgccagtttaaacgtctatgcaacaacagtcggtgctaatagctttagcaatggtgcttttaccactactacaggtacatacaatgtcattagttcctcctacacaggtggtcgtttctcaacacctactcaaaactttggggctaccgtaaatggtgctttcaatagtattgaatctacaagtggtggctccacggcaggtgtagcaacggctattactggcgttgccaatcgtgtagcgaattctaatggtgctcttgtatatggtgcaggtaatgaaataactaattctagtgcttcgttcagtacgcctggtgaaggtgctacgtccgcgaaggattttgcagacaaattaaaaactgctgttacatcctctaatggtgctggtgctaccatggccttcggtggcggcaataaggcagattatacattacgtacatccctgattggtgtaaacaataccgttacgggcgtacgtggtgaccaaagcaaggacaatttagcacttggcgttggcaatacagctacgaatgtgcaacatatgacggctatcggttctaagaacaccgtttctgatgcaaagaatacagttatcgtcggcgataaccgtaccgtaacaggtgctaataatgctgttattatcggctctagcgacaatggaacgacaacagcagttcacgatgcagtggcccttggtcataacacagacgtatccaccgaaggtggtgtggctcttggtagtggttctaaagcgacagtagacgccggtgcagttggttatgatatccttactaacgcgccatctaccgatacatctgctacctggaaatccacagcatctgctgtgtccgttggtgatgtagcaaatggcgtaacgcgccaaatcacatccgttgcggctggtacaaatgatactgatgcggtaaatgtggctcaacttaaacgattacatgacatgatatccgtgaatgcatacaatactgtcaacgttcaaggggatgtaacgaatcttaaaaaagatgtatcccgcttagataaacgcgttaacaaggccgtagctggttcggctgccttggcggcccttcatccgctcgactttgatccagatgcaaaatgggactttgcggctggctatggtcattatcataatggcaatgctgctgcactcggtgcattctatcgtcctaacgaggacgttcaattgagcgtaggttccactgtaggtaatggggaaactgttgtgaatgcaggtctttctgtgaaagtcggtgctcatagcaatgtatctcgttctcgcgtggccatcggtaaagaagtgctagaacttaagaaaaccgtagctcttcaaaatgcacaaatccaaaaattgacagccctcttaaacgatgtggcaggtacgcatatgaaagcagaccgcactacattattcccagatgtggctagcaaccattgggcttacgaagccgtaagcgatttatctcgtcgcggcttggtagaaggatacccagatggtacatttggtggtgatcgcttgttaactcgctacgaatttgcagaaatcgtataccgtgcccttcaaaacggcgtacaagtagacgaacaactcgtaacagaattcagtccagaaatggcattgttccgcgttgacacagtggcaaaaaatagccaaggacaaccgacaattgaacgagttagagtgaataataagaagtaataaaaaggcagatagatatctcaatatgaggtacttatctgccttttacttttgaggaatatgactatctctgtttatatatttaggatagtgtttgttgaaacttgctaaatctatcaaggatattacttggtaaagacgtaagtttgcaataatcagaaaataatgatcttcttaattgattttgttcatctgtgggattgttgaaaatagtatttttaaattccgtaataaacaatgcttttagatatgatgtctttagaaataaaagtatgattaatattgtggaatagaggcctttgcatgctgctttatcaatattaagtggttgctttaggtctttagttagataaatcagataaggcaatattttatatagttgtttaggttggattgatttatgacttctaaattgaacaaaatgaagattatgtgctgctaaatttctaaaggaacgtacattttcaagaccgtttctaataatatcgaccctttgattatattcaatcccaggagcattttcgaacaatatatcagtaataggctctttttcttggcgattaagtacacagaacaaattaattgcatcaccgaatgatatatttttaaataatatccatggaggaatatggttatggttttctttatagtgtttagtaggcattttacatttagctgtatcctttaaaagaggtaatatttctgaaagtacattatctttaaatgatacacctgaattatatgattgatagttatttgtatcaagatattttgcttcatctacaccaaaggaagaagcaatagaataggctaacaaatttttaaacatattctctataaatagactgtatttcataataaaggcttgaatacttttatctagcaaatataattcatacaggtattctatagatagtcctggcttaaatttgccattttccattagtgtacttttgtacccattaacgagatcgtaataggatatagatattaatgcatgcttagcaaaattgatgtcattaatcataagcccgtagtcattttgtagcttagtgatttgttcatcataggttttaaagggtttatcgtaggccatatagatatagactccagcataaaaagaaacccgctacaattaagtagcgggcatggtgatatgctcaaaggcaatatcgttttactacctaatttatagcataaaagaaagttaagtgtcaatatatataatattattcattcgttaattgagcgatgtcacctacactaataggagttattgtgggtggcataggcataggagtaggtgtaacaccagataaagtcatttcctctttttttgtttgttttagtaaggactgtaaaggactgagtacatttatggttgaataattaaataatttacattcagaaaattgttcataaggtgcatgtatttcaactattgcttttatagcatcataagtaccgtaatcatgttcatctataagaatacgaggacctttttctataattctaagggtttgtccacgtttagcaccattattaataccataattaatgagaagtgtattagaattgggaatagcaataacttcatattctttaaatgacatgttaaaacctccttttgcctatgtttttattttatgaatcatatcctaaaagaagtaatcttatttctcaaaataccccagcatttcaatgtgtgtcaacacttcgtccatgtattcttcggtcggtacaacgtagttatagccatccttagtggtgcggttaacagttagattttcgtcgaggttggcgattaaatcggcccgagagattggtttagctaattgtttcatcacgtataataggccgttgtcgacgtccccgtccacttggttgtacatgttacccggtgtgaggtattggctgccgcctttctccacgatggtttcgatgtatttaataaagcgctctgggatgtagctttcattttcaacaaacggcgtgcgaggataggaagaaccgtaaatgttgaggttgtccgtcacgatgagtaggaacagacgttgatataatacatcgccatcgatgacatagcccggatagtgagaactaatatagtggacaatatcctgaacagtgaattccttgaacgtatccatcaacaccttgatagcgatgtgaacggtattggtccagtcctcaggaatgcccttcacatttctagacggcgccataaagtacaggctgttcaagatgtcttgggttaccgtttcgtcgtggttgatcttgtcctcgttggacagtttcgtcaataggctcatgcggaattgcgtgtcgtacacgtaatcgtagaactgttccttgtcaatataattgccgttggataaggtggaaatgtttttttccacgtctcctgaaagccaggtaatgaaggatcgttgtaatgattcgtcacctacataggcacagccgtgttgacgagctcgttctatgaaatcagatacatacactggatcattgtatgtttccaagtactcgtgtgcaacgtaataatcattagattgtaacacgcggttgatgttgttaattttgtaattggattgtgcccgagaacgatcgtcgctgttcatcgtttccgctacaagctttaacacactcttcgtatacaacgtgcgttctaataaacccttatcttccgcccgtttatccgcgtacaacatgatatcgcgcaattgctccaaccgtttccagccagggtacgtattgtacgatacataagcgatgccacggctcgataaattctcgctgcaaatgtcgagaattttgtctttcaccatgtccggtacccaagaccagataccatgaacgatgatgtaatcgaaggtgccgaaattcgtatccacgtccataatgtttttttcgagtagcgtcacgttcttaaggccgatggattcgataatctccttgccgtgctccacctgtacgccggataaatcgatgcctgtgaaagtcgccgtagggtagtacatcgcttgtgggatgatattaccgccgcaggatgcgccaagctctaatacgcgcgccttgctcggcgccaccggatcaagtccgtaaatcttagccttagcatacaaattattaatattcgtgctagaaaatggctttgaaatatataggaacgtatcgtaggacgcctttaaatcattaatactcttttccacatccgtaggcacgtccatagtatgcgttgtcgtatccgttgcatccggtttagatacgacattcttgtttgttgccgtttcagcagaggctgatgcggccttattttttttagtttcttttttcataattaacccctttgttctacactccctcatgtattactgtagattagtatatcatactgtattgctttatagtgaaagtttatattcctatatataactatatatagcaaatttaatggatcatagaaacggcattttatagatatatatgactataaatagagaaattttaaatttaactattatatctctactctcacagttatgttcatgaatatctcattcatgctttatgaggtatatttgattagttttgctaatttaaacacttgtttttcttgataggtaatggtttttatatccttatttaacatggtttaagagcattttacaatatatcgaaaaaacttgtagtatataaacatattaatatcatgtttatgaagaaatcgtgattgttaatatttatgtaagtaaataaatcgaaaatgattaatatatgtttactggaattgaaaaaaatcgtacaaaaatgtgtaaaaaatacaccatttcttaacaaaaattaaaaaaataaacatttttccaattttatgagaaaaaaatgagagaaaatgttttacaaaacaaaaaatatttgttatagtatgtacatgaagtaagatgaatgaaaagtgaaacatgcaaaaatgttcttcacacaatgatttttatttctattgaatagggattaattaaggattataagtgtcttaaagaaagagaaaaagaaaggggttcatagaaatatgaataagatctttaaagttgtttggagcaaaacaaaagaatgctacgttgtagtatctgaagtagcgaaaaacaatggtggtaagaaaaaagcattgtctacagtttttgctgctttagtggcagtaggtgctatgatgcctggtcaagctggtgctgtatcctttaatggtggtaacagtggtggtcatgctgatggtgatgcatctattgctattggtagtggttgggctgactcggcatatgctcatactcagttttccatcgcaattggtgaccatgctaatgctactggtaaagcagctatcgctttggggcgtcaatctaaaacaaatggtgaagaagcatctattgctattggtaacgaaacagaagcaatcgccaaagatagtacagctgttggttctggttctaagtcaagtggtgaatatgcagctgctttgggtttccaaactaaggctactgcaaactatgcgacagctattggttctggtgcaagaggctatgctgaagattctcaagctattggccgtgaagctgaaacatcagctggtgcatatcgtgctatcgccattggtacgttatcaaaatcttctgggaattatgcaacatctttagggtcctctgcagaagcaagtgctgaaagagcaatcgctgttggttataaagctacagctaaggcacaaagcgcgatttctgttggtaatttggcaaatgctgatcacacagactctattgctgttggtaatggatctgcagctactggtgaccaagcaattgctacaggcagtaatgcaacagcaactaaaataggttctattgcgatgggtaaaaatgtagcggcatctggtgattattctacggcaattggtaataaagcaaaagcttccggcgcaaactctattgcgttcggtagtagtattgataatactactactggtacagtggcatcaggcgataattctattgctataggtatgaagtctacagcctctggagatggtgcggttgctcatggcgttggttctgaatcaacaggtactcactctgttgccgtaggtcgattatcaaaagctaagggcgctgaatctttagctttgggtgacgaagctgaagcgactgttaataaatctgttgcagtaggttataaagctaccgcaagtactgcagatggtgttgcaattggttccacgtctgtagcatctactgcggcaggtgtacaaggtttcaatccagctgattctcgcacaaataaatatggtggattaactagtgctgcacaaacatctacactcgcggcagtctctattggtaatggttctgcacaaactcgtcaaatcacaggccttgcagcaggtaaagaagatactgatgctgttaacgtagctcagttaagaagcgttaacttaaaatatgctgctgatacgggcaatagcgatttcttactaacagatggtacattgactgtaaaaggtgataatgatcttatttcaacatctgttgtagcaactggtgctgataaaggggctgttcaaatcacagctaaagtaggcggtactattaataatacagatggtaaagctgttaaacctactacaaatggtattgcaacaactgacaatgtagctgacgctataaataactcttactggaaagcaactgctggtggtaacacagatggtactccaagtgtaggtaatgttaaacctggcacacaagttacttatagtgcaggcgataatctaaaagtaaaacaaactattgctgcaaatggcaatcaagaatataaatactccttaaatccagttttaacaggtattacatctattgctaatactacaactggaccaaaaatgacatttggcggtagttctatcaatatcactggtggttccttagatatggggactaataagatcacaaatcttgctcctggtacagcggataatgatgcagttaatgtaaaacagttgaaagatactgaattacatatcacgcctggtacgtatacacctgatgctaataaaaaagttaaattaacgtatacagatggtaataatactgtagttactggtaaagaagctgttatcgacttgtctggtttggcaacaggtggtactgcatctactgagaaagttaaaaaagcagccaatggtgctaatgatacgaatattgcagaagtaaatccgcaaactggtgatacatacggtgcagctggtgcaacatatgaagtatccgtatctcgtaatgcagttaaagatgcagctcgtgaagctgtaacagtaaataacggtggtacaacaactggtggtacttatacagcagatacaaataaccctatctctgtaacagcgaaaccagataatactaaccacaatacaacatatgcagttacattcgatggcaataaagcagcaaaacaaattccattaacttataaagcaacaaatggtactattacaactgctgatcaaaccgttaaacttgataaaggtttgaatttcacaggtggtgattatacaactgctagcgttggtgctgatggtaaagtaacatttgatgttaaccttggtactgccccaacagtaactgatggtaaacctggtgttccaggacaagctggtgcagctggtaaagatggtattgctactgttaaaactgtagtagatacaattaataactccggttggaaagcaaatgctaaagcaaatggtggtacacttgttggtaattctacagcgactgttgtaaaacctggtgatcaagtaaactttgcggctggtaaaaacttaacagttaaacaagatttgactggtgaacatacatacacttattctttgaataaagatgtcgatcttactaatgctggttccttaactgttggtgatactaaagtaaataatgatggtattacaattaaggctcctacacctgcagcgggtacaacacctactacagatgttaagttgacgaatactggattagataacggcggtaataaaatcgttaatgtagctgaaggtacagctgatactgatgcagttaacgtaaaacaattgaaagacgctaaaactgtactagctgatggcaaaaatacgaaaaaatctggtactggtacagctgctgatccatataaagtgaatgtagaaggcgatttaactggtatttcctccatcacaaatggtggtacaaacaatggtaaaatttcctttggtccaaataaaactgtaactgtagatggtgatcatagtattacacttaatgcaagcacaggtaagattggcggtttacaaaacttaacatttgatccaacaaactttacatctggtcaagcagctacagaagaccaattgaaatctgttcatgatacattgaaagcaagtgaacttcacattgctccaacagaatctaaccgtactggtgagcatattgctggtgctgctactagtaacacagcagctggtgcagcagctaatgcttacaagtatgatgcaactacaaaacaagttgtattggaatacaatgacggtactggcgctaataagactggtactaaagcagttatcgacttctctgcattgaatactggtggtacaacagcttctacttggacggctaaaacatctgcagaaaatacaactgcaggttctgaagtaggtaaacatgctggtgacactagccaagtaattggtaatcaaaattctgttgatttccaagctggtaaaaacatgactgtgaaacaaactaatgatggtaatggtaatacaactattaactatgcattagataagaatcttgatgtagaatccgttcacgttggtaaagacggtaaagatggtaagattggtatcgatggtaaagacggtgtagatggccttgatggtactaaccgtgtagacattcatgtagaaaaaggtgctaaaggcgttgacggcactgacggtcatgatggcgtaaatggccataacggtaaaaatggcatgactcgtatcgtttacgaagataagggtggtaaacaagaggttgctacacttaatgatggtatgaaatatgctggtgatgatgcacaaggtactgataaaactaaagttatcgctaagaaacttaacgaaacattagatattatcggtggtgctactaaagcggacttgactactgataacatcggtgtaaataacgatggtaatggtaaattacttgttcaattgtctaaaaaacttaaaggtttggattctgttcaaactaaaactgttgaattaggcgaccatacaacatctggtggcacaactaatattacttataatgctggtgataaacgtattgagtacacaacacctggtgcaacccctggtactacggatactaagaaagtagcaactactgatgatatctggacaatccaaggtaatggtactgatgttgctcctgtaaatggtaaggttaatgtaaaagctggcgaaaatatccttatcacaactccaactactgccgatggttctatgactatcaatgcagtaacacctgctgtttatacagataaaaatggtaacaagctaactaaggataaagatggtaaattccataagcctgatggtacagaagtagcaccggctgatgttattacatccattcaagatgcagctggtaatgtaactggcggtaactccattgttaacaacgttggctccgctattaaaaacgctggtaatgcaggtgattctttcttgactaagttagatgctgctaacactgcaactccaaatgcagcagtaaacgtatctgacttgaagaacacagctgacggattgactgataaaggcttaaaatttgacgctaatgaaggtggcattaaaacaaataaactaggttctacagtaacagttcaaggttccggtgctttaactgcgggtaaagcatatgctgatgaatataatactgctaacatcagaactaatatcagccaaaataatggtgatacagttattaatgttggtttagcaaaagcgttgaaagatattaactctatctctaatggcgcttcctccattacgcttaacagcacacctggtggggcaactaatacaccagcagtacaaattactggcggcaacttgtccatgggcgatggcactataaacaataagattgtgaacttggcgcctggtacagcagatactgatgcagttaacgtgaaacagttgaaagatactgaattacacattactcctggcacatatacacctggtgctgataaaaaagttaaattaacgtatacagatggtaataatactgtagttaatggtaaagaagctgttatcgacttgtctggtttggcaacaggtggtactacttctactgaaaaagtacaaaaagcagccgatgctactggtgacaaaaatattgcagaggtaggaccaaaatctggtgatacatttggtgctgctaatgcgacttatgaagtatccgtatctcgtaatgcagttaaagatgcagctcgtgaagctgtaacagtaaataacggtggtacaacaactggtggtacttatacagcagatacaaataaccctatctctgtaacagcggtaccagatagtactaaccataatacaacatatgcagttacattcgatggcaataaagctgcaaaacaaattccattaacttataaagcaactaatggtactattacaactgctgatcaaacagtaaaactagataaaggcttgaacttcacaggtggtgattatacaactgctagcgttggtgctgatggtaaagtaacatttgatgttactcttggtacaactccaacagtaactgatggtaaacctggtgttccaggacaagctggtgcagctggtaaagatggtattgctactgttaaaactgtagtagatacaatcaataactctggttggaaagcaaatgctaaagcaaatggtggtaaacttgatggtaattctacagcgactgttgtaaaacctggtgatcaagtaaactttgcggctggtaaaaacttaacagttaaacaagatttgactggtgaacatacatacacttattctttgaataaagatcttaaagatttaacttcagtagaaattggtggtagtacaattaagactgatggtgatcatattacaattacatctccagatacaaatcctggtgctacacctggcgctactgtaacaaataaagttgcaaatcttggcgatgaaaaacatattaagcctgatacttatgctgttgctaatgatggctccgtaacattaaaatatgttgatggtaatggcaaagatttaaccgaaacaactaaaattactggcattgccaagaaggccaaagttatcaatggtaaaaatacaactgttgaggaaggcacagacgcagttgataatagtacaacatataaagtaaatgttaagggcgatttaactggtatttcctccatcacaaatggtggtacaaacaatggtaaaatttcctttggtccaaataaaactgtaactgtagatggtgatcatagtattactctaaatgcaagcacaggtaagattggtggtttacaaaacttaacatttgatccaacaaactttacatctggtcaagcagctacagaagaccaattgaaatccgttcatgatactttgaaagcaaatgaacgtcatattgcacctacaacagtggcaactggctctactgaaactaaaggtggtacagctaatgctggggggactgcaaatgtatacaaatatgatgcagctagtaaaactgttacattgacttacaatgatggtaatggtcatgcagtcactgatactaaagcagttatcgacttctctgcattgaatactggtggtacaacagcttctacttggacggctaaaacatctgcagaaaatacaactgcaggttctgaagtaggtaaacatgctggtgacactagccaagtaattggtaatcaaaattctgttgatttccaagctggtaaaaacatgactgtgaaacaaactaatgatggtaatggtaatacaactattaactatgcattggataagaatcttgatgtagaatctgttcacgttggtaaagatggtaaagatggtaagattggtatcgatggtaaagacggtgtagatggccttgatggtactaatcgtgtagatatccatgtagaaaaaggtgccaaaggtgtagatggtactgatggtcatgatggtgtaaacggccataacggtaaagacggtatgactcgtatcgtctacgaagataagggtggtaaacaagaggttgctacacttaacgatggtttgaaattcactggtaacaatgaatctactgtaaataaccataaacttaatacacttgtaaaagttcaaggtgaaggtacaaaagaaagtactgtagttgatcctgcaacaggtaagaaatatgtagtactgtctgatggtacgactaaattcgaatctgctaaagacaacatcgcagtagaagcggatggtacagatacattaactgttaagttgaacaaaaacctcaaaggtttgaacagcatccaacttggtggtaacactattcaaagtaatggtgataacattactttcacaactaatggtggcactacaaaaactgtagctactacagatcaattgtggacaatccaagctaatggtactgatgttcctgctacaaacggtaaagttaatgttgttggtaaagatggcattactgtagctaaaaatgcagctggtaaccttgaaatcagcggtgctggtcttggcacaatgaatggttttgatgtaactgctaacaatggtgctacaagtaaaactattgataatggtaaaaaagtagacttcaatgctggtagcaatttaactgttaaacaaacaaatgatgccactggcactcatattgagtatgcattgaaagaagctgttgatcttggcactaatggttccttgaaagcaggcgatactactgttaataaagatggtgtaacaattgctaatggtccttccattactaagactggtgtagatgcaggcgataagaaaatcactaacgtagctgatggtgctgtgaatgcaacatctaaagatgcagttaatggttcccaattgaagaaatacactgatgcagcgaaaacaacagtagaagctggcgatgacaacgttaaggttgagactgataattcagcagcagatggtcatactaactacaaagtatccttaaaacctgttgtaactattggtgatactcataaagttaaaatcgatggtcaaactggcgacatcactggtttaacaaatgtagatcttactgatcctacatttgcaactaagggtcgtgcagcaactgaagaacaattgaataaagttcttactgaggctaagaaaaaagccgttgaaaaagtacaagctggtaccgcagctgctggtgatacaaatattgctactgtagctccaaaagctggcgatacattcggtgcagctggtgcaacatatgaagtgtctgtatctaaaaatgctgttaaagatgctgctaaagaagctgttaaagtaacttctgcaagccctgctattacagtaactgctgatacatctgtagctcatgaaacaacttataaagttggtttcgatggtaatcaagctgcaactcaaattcctttaacatacaaacaaaacggtggtagtgctcgtacagttaaattgtccgatggcttgaacttcattgatggcacaaatacaaaagctcgtacagctgctgatggtaaagttacatttgatgtaatgggtgatctaacaggtattacatccatctctaatgctgctggtggtcctaaaataacattcggtggtaactccatcaatgtaacaggtggtaaccttgatatgggtggtaagaaaattactaacattggtaaaggtacagatccaacagatgcggcacgtgttggtcaattgactaaggttacatctaacaaccactctgttgtaattcataaaactacagatgctgatggtgctccagtttacgacttggcagtaacaggtactccaggtgctcctgcagctgaccctcgtgtagatatgctcggcgaagaaatcggtcgtgtaggtgctcaaggcgcagctctctccgcattgaaacctatccaatacgatccattagaaccaactcaaatcatggctggttatggtaactaccgtggtaactccgcagtggctcttggcgtagctcattacaaaaatgaatctacattaatccatggtggcgtatcctgggctggtggttctagccacatgatggcaaacgctggtgtaacttggaaagttggtaaccgtgatagcgaagctgctgtagcagatcgttaccgcaaaggccctatcagttccgcgtatgcaatgcaacaagaaatggcagctatgaaagctcaaaatgccggattaaaaggcgaagtatctgacttgaaagcagaaaatgaacaaatgaaagctcaaattgctgcaatgatggcaaaattaggtttataatttgatagattaaactttcacagataacgggaagagggaactcgataccgagaaccctctcgtcccttttggttcgactaagaaaagaggaatagatatgaaaaaatctacaatgcttgctttcacagcagcagtattaatgagcgctgcatcccttactggtcacgcagccagcgcacctacatatgatgatgtattaattgttaaaaaccctgtaatgacgccacaactcggatctgttgtactcgttcctgtagcgagcccacaaacggtggctgctgttcatgattatgtgaaagcttggcaaaatgcagaaatcaatattgcaaaagctaaggttaaatacgatgatcataaacaattgacgaaatctgaaaaggtttggttgcattcttatgacaaacataactatgctgactatttccgcacacattccatcggtcgtgtgcatggtcaagaagtgttcatgaactggaacggtgaaaatcgcaacaaaaatgaatacgaatactttgatatgccaaaatacaatgagcaagatggtttcaccaatagctatgggtacaatgtacttcgtggtatggtagatcaaattaatgcagttatccaagagcaaaagaaaatcggtggtcctatgactgacgaagaagcacaagcgttggaagactccattttggacatcatggctcatgatcaagaacatgtaaacaatgacgaacttcgtcactacatgaacgaaacaatttggtacgccgcaaaacaaacggtgaaaaacaaagctagcgaagaacctcaagctggtgatgaccacgaagtagaccttcgcgcagcaatggctaatccgcctgcagatcaacctcaatctcgtaaagtaaacttacgtgatgctataggcaaataatctggctgaacactaaattataaatccatatggcccttataggctctctaatcccacccccctttcttctataggggccataataaaaacgctcacactgtgagaacggacttttgaattgaacgcaattttgaaagtaccgtcccatagtgtgggcgttttttggtgcataaaatatggtttatagtagatccataggttcattttgtgtgtagttttatttggaatactagcatatattaatagatatatattaacaaaccataaaatttagcattatacaatttaatgtattgaattgatgaatatcttataaatacagtgttttgctgattaatcgtgtaatttcgatttattaaatttatagaatagtggcattgattagaggccttattttgtctgattttatattatttaacatatttataaactaaaaagaactatgacttatatgaaaagtatatgaagaaaatgtcgttaagtacgctataaacatagttatagcgtactttttgataaatgtgattgtttttacacatacatataaaattcagtttattttcatctaaaatataaaatttcattaaataaataggtgtaaaagtatttacaattaattaataaattgatattattaagttatcctatatgaagtgtgtgtgaatgagagaaaaaccactcttcatgaagtgaactaaagtgtaaaagttacatttttcatgtacttatgagaaaggggttcaaaggttttatgaataaggtctttaaagtcgtttggagcaagtccaaggaatgctacgttgtagttcctgaaattgcgaaaaataatagcggcaaaaagaaagtcctagctagcgtattggctggtttagcgcttgttggcgttggcgcacaaatgggtactcctgtagatgcctatagaagtcctgatggcagtgtaaatactcaagatagtcgtattaatattgcggctaatgctaaacctagtaatagtgttggcgttaactccatcgttgttggttaccaaaacacaactgatgatcaagatggcactacggctcttggtgcaaataaccaagcatatggtaactctggcttagctgttggtaatcaaaatgaatctagaggcggtgcttctactgctatcggtgctggtaatagagcaagtggcgctgcaacagtagctattggtaacgtaagtaatgccaatgctaaaagtgctattgcaatcggttcctataacaatgttaactatacaaaaggtacttgggctacagcacctttacaagctggtgcatactctacagtcgttggtaactattctagtgcgactggtacagaatcagctgctatgggtgtttattccaattctgctggtcctggatcttttgcagctggttacaaagaaaatgcattgggccaaaactctgttgccattggttctgaaaatacatcccatgtagcagatacaatcacattaggtcaacaaaataatgctaaaacaatgggtggtatctccattggtaaaaataacttgactgattctgcagatggtaaacgtgatgatgtagaaagaaataaagagaattctcaaatcgctatcggtcgtgataatacagctactaacttagatgctattgcaatcggtcgtgatacacatgctacaggctctggtgcaacagctcttggtgcacgtgctgatgcatccggtaataatgctattgctatcggtcaaagtggtaaagattctgctcgtgttgttgcatctggtgtaaactccattgcaatcggtatgcaatctcaagccactggtgaatctgccatcgctgaaggtcctggctctcgtgcaggcggtaaatatggcgttgcattaggtcgtacaactaaagcgaatgcagaagctgctactgcattaggtaatgcagcagaagctaacattgccaatggtgtagcactaggctctagctctgttacaacaacagataaaggcgttaaaggttacaatccttccgatgtccatacacgtcattacacaaacttagctaacaatgttcgcacagctactactgctgctgtatccatcggtaatggtagtacattgactcgtcaattgacaggtcttgctgctggtactgctgatacagatgctgttaacgtagctcaattgaaaaacgttggcgttgcattgactggcaatactggttctagcgacttcttagctgacggcggcaaattgaatgttcgtggcgaaggccgtgtatccgcagctgttgctgatgaaaatactaaagactccagattgactttgacatttgatgacaaaggcatggtgaaagctggtaaaaacgttactgttgatgaaaaaacagttgatggtcgtactacatacacaatcaacgctgcagacgctgctgcaaaatacgatttcttaacaaatgctaaggctaacggtggtaaattagatggtactgctacacctactaaggttgaaagcggtcaaacggttacctatgccgctggtaaaaacttaacagtaaaacaagatatcaaccaatctgcaggcgaacaaacatatacatattccttgaacaaggatttaaaagaaattacatccatcactaacaatggtggtcctacaatgcactttggtggtgacaacatcagcatcactggtggtaacctagatcttggtgataacaatatcactaacctaaaatctggtggcaatgtaatcaataacgctgctaacattggcgacgtaattcgtatttccaaagctaatgacttgcatgtagctcctacagcaggtactaacaataacgtagctgaatacactgtagacgctaacaaaaaggttacattaacataccaagatggtaatggcaacactgttaacggccctaaggctgttatcgacttgagcggtttgaaaactggcgatatgagctccttcaacgtgaaatcttctgctacagaaggtaaggttgcacaaggttctgctggtgttcaagaaatccgtgacggcaaaactgtggaaatgcaagccggcaaaaacatgaccattaaacaaactaataaaaatggtaatgcagctgttgaatttgcattgaacaaagacatcgatttgactccagatgggtctatcaaaatcggcgacactaacatcactgacaatggtttgactatcaacggtggtccttccattactaaaactggtatcaatgctggtggtttgaacattactaatgtaaaagctggcgtaaatgataacgatgcagttaatgttagccaattgaaacaagttcgtgctgatgaacgtcacatcaaacctggtgaatacgcagttgataacaacggcaaagtaacaatgacttaccttgatggcaacaacaaggacgttcctaacgaaacagctgttatcacaggtattgctaaacaagatctttccaatatcaacaagggtggcgaaacagtcatccaaaatcttgctaaaaaatccatcgatatggaaaatggtaagaatacaaaggtgagcaaccgtgaaatcaatggcgttaaaactttcaaagtagacgttgaaggtgatttaaacgacattacatccatcacaaacaaagctggcgatggcaaggttgtattcggtggtaaccaaactgttaacgtagcaggtgatcacaatattaacttgaatgctaaagttggtgacatcactggtttaactaacgtaactttggatgctcctgattttgctaaaaaaggtcgcgccgctactgaagaacaattaagcatcgttaataacggtttcaataacacagttggcttgactggtaacacaggcgctactgatcttcaaaaattgaaccaagctggtggcttgagctttggcgtaattggtgctaacaatggccaatacatcaaaacaactgcatctggtagcaacgtagctgttgacttgtccgatgaagctaaaggtaaattgaacaatactgtagaggttcgtggtaaaaatgctgcgaaggttacttctgtaacagaaaatactgttgacggtggtaagaaaacaatctacacagtagacgttgataatgtaacacctacagctgcttctactgaaaaggtgaaagcaaaagctgattccagtagttctacagataaaaacattgctaaggttactcctcaagcaggtgaccaatatggcgacgctggtgcaacttacgaagtaaacgtatcccgtaacgacgtaaaagacgcagctcgtgaagcggtaactgtaaatactacaaacacaactaacaaccctatcactgttacacctgtacaagatgaaacaaaccataacacaacttacacagtaacattcgatggcgataaagctgctaaacaaattcctttgacatacaaagcgaatggccaaaatgctcaaacagttacattggataaaggtttgaacttcacaaacggtagaaatacaacagcttctgtagatgctgaaggcgttgttaaatacgatgtgaataaagatttagtgaacatcaattccatttccaatactacaaatggtccaaaaatggaattcggtcctaactccatcaacatcacaaatggccctatcaacatgggtgaccaaaacattactaaccttaaatctggtggtgatgttatcaataacgcagctaatattggcgacgtaaaacgtatttctaaagaaaacgatttacacattgcacctacaacatctaatcgtcaaggtgaaacaactacatcttacgcttacgatgcagcaagtaaatctgttacattgaaatataacgatggtaatggcacaactcaagctggtacagtagcaaaaattgacttatccggtttggctgatcaaatcaaagacggttattccttctctactgacgctaaaggtaatgtagttggtaaccatgctgttacacctgtagcaaatggtaaaactgtttcttatgcagcaggtaaaaacttaactgttgctcaaaatattgataatgcaactggtgaacatacttacacatatgcattgtccaacgatgttgatttaacaccaaatggttccttgaaaattggtgacacaattctcaacaatggtggtttaacaattacaggcggcccatctgttactaagactggcatcaacgctggtaacttgaacattactaatgtgaaagctggcgtaaacgacactgatgcagttaacgtaaaacaattaaaagatgctcgtacagttgttacatctaacgataattccgtaacaattaacaaaactgaaaacggtaaccaagtgacttacgacttgcacgtgactcctggtgctgcacaatctgtatggaatgtgaaatccacaggtaacacaactgctgattctgaaacagctccgaaaactatctctgatggtaaaacagttgaaatggcagcaggtaagaacttgactgtaaaacaaactagcaacaacgacggtgctaaggttgaattcgacttggctaacgatatcaagattggtaacgacggcaaagacggtagagacggcgttgacggcaaaatcggcgtaaacggtaaagatggttcttccgttgtgatcaacggtaaagacggctccatcggcttaaatggtaaggacggcaaagacggtcttactatgaagggcgaaaaaggccaacctggcttaaacggcaaagatggcatcactcgcatcgtttatgaagataacaaccatgataaacatgaagttgctacgttagatgatggtttgaacttcactggtaacaacactgatacagtgaacaaacaaaaattgaacagcttagtaaaagtacaaggcgaaggcgtagataaaaatacatctgctacattcaagagcgcagctggtaacatcaacgtaaaagctgatggtacagatactttagaagttcaattgaacaaagacttgaaaaacatcaacacaattaagaacggtggcaatgctactttcacaattggtggcgataactttgcattcaatggcggcaacgtaagcatcggtggtaacaacattactaaccttaaatctggcattgtaaataacaatgatacagataacacaaatgctgctaacatcggcgacgttaagaatatttccaaagctaacgacttgcacattgctcctactacatctaatcgtactggtgaaacaactacatcttacgcttacgatacagcaagtaaatccgtaacattgaaatacaacgatggcaacggcgctaaccaagctggtacaatcgcgaaaatcgacttgtccggtttggctgatcaaatcaaagacggttattccttctccactgacgctaaaggcaatgtagttggtaaccatgcagtaacagctgttggcaatggtaaaactgtttcctatgcagcaggcgataacttgactgtaaaacaagatatcgatgctacaactggtgaacacacttatacatacgcattgtccaatgacatcaaggtcggcaaagacggtaaagatggcatcgatggtaaaatcggtgtaaacggtaaagatggttcctccgttgtgatcaatggtaaagatggttctatcggcctcaatggtaaggacggtaaagacggtcttactatccgtggcgaaaaaggtcaagatggcgtagacggtaaaaatggtactaatggtatcactcgtatcgtatacgaagaccacaaccatgataaacacgaagtggctacattggatgacggcatgaaatatgctggcgacgatgcacaaggcgctgacaaatccaaagtgatcgctaagaaattgaacgaaactatggacgttgttggtggtgcagataagtccaaattgactgacaacaacatcggcgtgaacaacgtggatggcaagttgaaggttcaattgtccaaagaagtgaacttgactccatctggttccttaacaattggcgatactgtagttaacaacaatggtttaactatctctggtggtccatccatcattaaaactggtatcaacgctggtaacttgaacattactaatgtaaaagctggcgtaaacgacactgatgcagttaatgtaaaacaattaaaagatgctcgtacagttgttacatctaacgataattccgtaacagttaataaaactgaaaacggtaaccaagtgacttacgacttgcatgtagctcctggtgctgcacaatccgtatggaatgtgaaatccacaggtaacacaactgctgattctgaaacagctccgaaaactatctctgatggtaaaacagttgaaatggcagcaggcaagaacttgactgtaaaacaaactagcaacaacgatggcgctaaggttgaattcgacttggctaacgatatcaagattggtaaagatggcaaagacggcgttgacggtaaaatcggcgtaaacggtaaagatggttcctctgttgtgatcaacggtaaagatggctccatcggcttaaatggtaaggacggcaaagacggtcttactatgaagggcgaaaaaggcgctgacggcgtaactcgcatcgtttacgaagatcatgacaacaataaacacgaagtagctacattggatgatggtttacgttttgacgctaactccggtggcgaaaagaaaaataaacttggctccaaagttactgtaaaaggtacaggtgctaaagctgattccgaatacgattcctctaacatcaaaacaagcatcacgcaaggggctgatggtaacagcgaaatcaacatcggtttggctaaagacttgaacaacatcaacacaattaaaaacggtggtcctgctactttcacaatcggcggcaacgaattcaaattcgacggcggcaatgtgaacatgggtggcaacaacattacgaaccttaaatctggtatcgtaaataacaactccactgatgatacaaatggtgctaacatcggcgacgttaaaacgatttccaaagctaatgacttgcacattgctcctactacatctaatcgtactggtgaaacaactacatcttacgcttacgatacagcaagcaaatccgtaaccttgaaatacaacgatggtaacggcgctaaccaagctggtacaatcgcaaaaatcgacttgtccggtttggctgatcaaatcaaagacggttattccttctccactgacgcgaaaggcaatgtagttggtaaccatgcagttacagctgtaggcaacggcaagactgtttcctatgcagcaggcgataacttgacaattgctcaacatatcgataatgcaactggtgaacaaacatatacatatgcattgtccaacgacattaagattggtaaagatggtaaagacggcattgatggtaagatcggtgttaacggtaaagatggttcctcggttgtgatcaacggtaaagacggctccatcggcttaaatggtaaggacggcaaagatggtcttactatgaaagcaaaagacggtcaacctggtgtaaacggtaaagatggtatcactcgtatcgtatacgaagataacagcaagaatacacatgaagtggctacattggatgacggcatgaaatatgctggcgacgatgcacaaggtgctgacaaatccaaagtgatcgctaagaaattgaacgaaactatggaccttgttggtggtgcagataagtccaaattgactgacaacaacatcggcgtgaataacgtagatggcaagttgaaggttcaattgtccaaagaagtgaacttgactccatctggttccttaacaatcggcgatactgtagttaacaacaatggtttgactatctctggtggcccatccattactaagactggtatcaatgctggtaataaaacaattgttaacgtagatgctggtgtaaatgatactgatgcagttaacgtaaaacaattgaagacagctaaaacagaagttaaggctggtaataatgtaactgtagacacaacttacggtaatgatggtcatacaatttatactgttaatgcgaacgacgtagctcttggcgatgcagtattgaaatactccgctaacggcactaacacgcaatccgttaaattgtctcaaggcttgaacttcgttgacggtaactacacatctgcttctgttgatgcaaatggtcaagttaaatacgacgtaacaatcggtaaggtgaaagacggcgttgacggtaaaccaggcgtagatggtaacgatggtatcgcaacagttaaaactgtagttgatacaatcaacaactccggctggaaaggtgatgttactggtaacacagtcaataaccatactgcaacaatcgttaaacctggcacaactgtaaacttcggtgctggtaaaaacttaactgtagaacaaatcgttgatagagtaactggcgatcatacttacaactatgcattgtccgatgacatcaaagttggtaaagatggcaaagacggtgttgacggtaagattggtgtaaacggtaaagatggttcctccgttgtcatcaacggtaaagacggctccatcggcttaaatggtaaggacggcaaagacggtcttactatgaaagctaaagatggccaaccaggtgtaaacggtaaagacggtatcactcgtatcgtatacgaagataacaacaagaatacacacgaagtggctacattggacgacggcatgaaatatgctggcgacgatgctcaaggcacagataaatccaaggttatcgctaagaaattgaaccaaacaatggatatcgttggtggtgcaaacagcactaaattgactgacaataacatcggcgtgaacaacgtagatggtaaattgaaagttcaattggctcaaaacatcgacttgactccagcaggttccttaactatcggtggtactagcattactgataatggtttggtaatcaaccaaggtccatccattactaaaggcggtatcaatgctggtaataaaacaatcgttaacgtagctcctggcgtaaacggtactgatgcagtaaacgttaaccaattgaactctgctagaacagaagttgaagaaggtgacaatgtaactgtaacatcccgtacaggtgctaacggtcaaacaatctacaaggtaagtgctactggcgttaaccttggcgatgcagaattgaaatactctgctaatggcactaacactcaatccgttaaattgtctaaaggtttgaacttcgttgatggtaactacacatctgcttccgttgatgcaaatggtcaagttaaatacgacgttaaccttggcaacatcaaacaaggtacagacggaaaaccaggtgtagatggcaaagatggtatcgcaacagttaaaactgtagttgatacaatcaacaactccggttggaaagctaatgcaacaggtaatgtggtaggtacatccactgcaacaatcgttaaacctggcagcacagtaaattacggcgcaggcaaaaacttgaacgtaaaacaaactgtaaacggcgaagaacaaacttacgaattcgcattggataaagatttgaaagagcttaacagcgttcaaactaacacaatccacttaggtagcccaacatctcatacaactattaactacaatgcaggtaatgatcgtatcgagtacacaactaagaacggcactaaacaagtagctaacttagatgatatttggactatccaagcaaatggtacagacgttaaacctgtaggtggcaaagttaatgttgtaggcggcgaccacatcaaagtttctactgatgcagctggtaagatgacaattagtgctgacggtgttggtactatgaacggctttaacgtgaaatctactggtaatactactaacgattccgataaaacagctaaaaacatcactgatggtaaaactgtggaattctctggtggtaagaacctcactgttaaacaaactaacactgctgacggtgcaaaagtagaattcgcattgaacaataacatcgacttgactccaaacggttccgtaacaattggtgacacagtagttaacaacgatggtttgactatcactggtggccctactatcactaagaacaatgttgatatgggtggccaacaaattcacaacgtgaaatctggtggcgatgtagattccaatggcgctaacattggcgacatcaaacgtatctccaaagctaacgatactcgtatcaaagacggtaactacgaagttagccaaaacggtactgttgaaatgacatatgttgatggttctggtaaacaattagttgacgaacacggcaatcctgtgaaagcaactatttctggtatcgctcgtcaagacttgtccaacattactaacgaaggtaaaaaggttatcactggccttggcacaatcgtgaaagctggtcaaaacgtatccgttgatgaagcaactgataacgcaactggtcaaaaaacatatactgtaaacgctgatctttctggcgcgaaagtttatgctggcgttggtactgatggttctggtgtggctaaaggccttaagaaccctgaaaaagttgaaaaaggtacgcaatacatcgctggcgacaacatggttgtagaacgcaaacatgttgatggtgatgataaacttgataactccatcacttacagcttgtctcacgacttgactgaaatcaattctatcagcaacggtggcgcaactcttcgcatcaacgctaacccaggcggtaataaatacgaccgtgatgcagctgtaactccagctcttgaagttcatggtggtaatctcagcatgactggtaatcgcatcgttaaccttgcacctggtatcgatggtactgatggcgtaaacgttaaccaattgcgtgactccttaacaactgttaaatctactgatggcactgtacgagtgacagatctaagcacagatcctaacaagcatgaatacgatttacatgttaaccctgcagctgaccctcgcgtagatcaattaggtgaagaaatcggtcatgtaggtgcacaatctgctgcattgtccgcattgaaacctatccaatacgatccaatggaaccaactcaaatcatggctggttatggtaactatcgtggtaactccgcattggcattgggcgtagctcattacaagaacgaatccacaatgttccatgcaggcgtgtcctgggctggcggcaacggccatatgatggctaacgctggtgtaacttggaaggtcggcaaccgcgatagcgaagctgctgtagcagatcattaccgtaagggtcctatcagctctacatatgcaatgcaaactgaagtggcttctatgaaagcacaaaatgccggattaaaaggcgaagtatctgatttgaaagctgaaaatgaacaaattaaggctcaaaatgcaggcttacaaagcgaagtagaccaattgaaagctcaaatggctgctatgatggctaaattaggtatgtaataagatacacatggatggggattctccttgaatcccctaccatcgctaatattcgacaatgaaaagaggaatagatatgaaaaaatctacaatgcttgctttcacagcagcagcacttatgagcgctgcatccattacaggatatgctgctggctcaccaacatatgatgacaatttgattttgcctaaccctgcttctacaccaactacaggtcctgttgtactcgttcctgtggctagcccacaaacggtacaagctttgcatacatttgtacaagcatggcaaaatgcagaagttaactatactaaagctaagattaaacatgacaatcatgaacaattgactaaggctgaaagtaaatggttacattctaaggataaacataactatgcggactacttccgcacacattccttgggacgtgttcatggctttgaagtcgcattcaactggaacggcgaaaaccgtaacaaaaatgaatacgaattctttgatatgccaaaatacaatgaaaaagatggtttcgtaaatagctacggattcaacgtattacgcggcatggtagaccaaatcaatgcagtcgttcaaagacaaaaagaaatcggcggtcctatgactaacgatgaagcaagtgctttggaagacgcaatcttggatatcatggcacaagatcaagaacatgtgaacaacgaagaccttcgtcacatgatgaacgaaacaatttggtacgcagctaaagaaaccgtaaaaaacaaagcaagtgaagagcctactgctactgaagaacacgtagtagatcttaaaaaagcaatcaatgagccagtggaaccttccgctcctcacacaattgatttgcgtaaagcaattcaacaataagattgctgaccgtatatctttaaaaaaacaatatggcccctcatatgctgatataggggccgtatataccctagaacccctaactagggcacaaataatccttatacgaatgacgccacccttgtgggtggcgtcatttgttttataaaagaatgtaaatggtatatcagataagatgttaaggtggatcaataagttatataaacataatgatattagataaacatattatagtattatatagtgttaactaattactacaggcctgtactgattctaggatgacagttgcaaggtctatagagaaatagaacaggcctgtactaattgtaggatgatagttgcaaggtctcctgagagatagaacaggcctgtactaaatgtagaatgacagttgcaaggtcccccaagaaatagaacaggcctgtactaattgtaggatgatagttgcaaggtctcctgagagatagaacaggcctgtaccaattgtaggatgatagttgcaaggcctcctaagaaataaaacaggcctgtactaattaatagatataactgaaactaattagtggaatagcatatattgtatttatagtctatagaaatataaaaagggggttatcaaatacaatatatagtagtatcaaaataaataaatacattatacagaaaaggtgaaaaaagtttcaaattttttaaaattaggacttgcgcgcatctcttgtttgtactataataaccatacagtcgttgaggcgactgtttcttaatgaggaaacactagaaactatctagattctttgttagttgttttagaatttttatgtaaatcccttatatagaggtgattacagaattctaaaaaagattataaaaagtgcttgacactgaatggtcaacatgttattataatctagtcgccagttggtgaaacacttcaaacgaaagtgcttcggagctagataatatctggtctaactggtacagatctttgaaaactgaacaatgataggtaatcaatcatatgattgaacatatgccagagtgcgggttttgacatagtcaaaaccaaccataattcaaagttacttaaatgtaacgacaacacataatgagctattcaaatagcttcaagatatcttggagagtttgatcctggctcaggacgaacgctggcggcgtgcttaacacatgcaagtcgaacgaagagcgatggaagcttgcttctatcaatcttagtggcgaacgggtgagtaacgcgtaatcaacctgcccttcagagggggacaacagttggaaacgactgctaataccgcatacgatccaatctcggcatcgagactggatgaaaggtggcctctatttataagctatcactgaaggaggggattgcgtctgattagctagttggaggggtaacggcccaccaaggcgatgatcagtagccggtctgagaggatgaacggccacattgggactgagacacggcccagactcctacgggaggcagcagtggggaatcttccgcaatggacgaaagtctgacggagcaacgccgcgtgagtgatgacggccttcgggttgtaaagctctgttaatcgggacgaatggttcttgtgcgaatagtgcgaggatttgacggtaccggaatagaaagccacggctaactacgtgccagcagccgcggtaatacgtaggtggcaagcgttgtccggaattattgggcgtaaagcgcgcgcaggcggattggtcagtctgtcttaaaagttcggggcttaaccccgtgatgggatggaaactgccaatctagagtatcggagaggaaagtggaattcctagtgtagcggtgaaatgcgtagatattaggaagaacaccagtggcgaaggcgactttctggacgaaaactgacgctgaggcgcgaaagccaggggagcgaacgggattagataccccggtagtcctggccgtaaacgatgggtactaggtgtaggaggtatcgaccccttctgtgccggagttaacgcaataagtaccccgcctggggagtacgaccgcaaggttgaaactcaaaggaattgacgggggcccgcacaagcggtggagtatgtggtttaattcgacgcaacgcgaagaaccttaccaggtcttgacattgatggacagaaccagagatggttcctcttcttcggaagccagaaaacaggtggtgcacggttgtcgtcagctcgtgtcgtgagatgttgggttaagtcccgcaacgagcgcaacccctatcttatgttgccagcacttcgggtgggaactcatgagagactgccgcagacaatgcggaggaaggcggggatgacgtcaaatcatcatgccccttatgacctgggctacacacgtactacaatgggagttaatagacggaagcgaaaccgcgaggtggagcaaacccgagaaacactctctcagttcggatcgtaggctgcaactcgcctacgtgaagtcggaatcgctagtaatcgcaggtcagcatactgcggtgaatacgttcccgggccttgtacacaccgcccgtcacaccacgaaagtcggaagtgcccaaagccggtggggtaaccttcgggagccagccgtctaaggtaaagtcgatgattggggtgaagtcgtaacaaggtagccgtatcggaaggtgcggctggatcacctcctttctagggagacatacaccgagccaagagcttggatgtcacttaggtcgacactttggccagtaagtagacgtagcatatgcgctagctgtacttacaacctacattgttcggttttgagagatctgtaaagactctcaaacaactccataaggagttttgttctttgaaaactacatagaagataattattatatatatttgtaaggtcatctcttagaatttctaagtaggttgacccgagcacataggaaataattctctgacttattggtgacgtacatgaaaatgtacggctacaaaataaacgacaatgtatctaatgcatgtcataaaatctaagtaaagattttaagggcgtacggcggatgccttggcgatatcagccgaagaaggacgcggtaagctgcgataagctacggagaggtgcaagcaacctttgacccgtagatttccgaatgggggaacccggcagtggttatgcactgtcacccatacctttgagtatgaggagggcacctggggaactgaaacatctaattacccagaggaagagtaatcaaacgagattttcttagtagcggcgagcgaacgggaaagaggccaaaccggagcgggcaaccgcatcggggttgaggacagtcatcaagtgtaaatgaggtagaagaatcgagttggaaagctcagccgcagaaggtgaaagccctgtaatcgaaaccttgcatacatgggactgtatccagagtaccacgagacacgtgaaaccttgtgggaagcaggggggaccaccctccaagccaaaatactgatatcgaccgatagcgcatagtaccgtgagggaaaggtgaaaagaacccctggcggggagtgaaagagaacctgaaaccgtatgtctacaaacagtcgaagtctgtatatatatcaggacgacggcgtgcctattgaagaatgaaccgacgagttactgttgctagcgaggttaagtggaaaacatggagccgcagcgaaagcgagtctgaacagggcgttcagttagtgatagtagacccgaaaccgtagtgatctatccatggccaggttgaagcacaggtaaaattgtgtggaggaccgaactcgtgagcgttgaaaagctttgggatgagttgtggataggggtgaaatgccaatcgaacacggagatagctggttctccccgaaatagctttagggctagcctcgaggttgagagtataggcggtagagcactgatcgggctaggggccataccggttaccgaacctagtcaaactacgaatggctatacttatactcgggagtcagacagtgaatgataaggtccattgtcaagagggaaacagcccagaacaccgactaaggtccccaatgtcatactaagtggcgaaggatgtggaatttccaaaacaaccaggatgttggcttagaagcagccaccatttaaagagtgcgtaatagctcactggtcgagagactctgcgccgaaaatgtccggggctaaagtatgaaaccgaagtcgtgtcatatacagcaatgtatatgggtaggggagcgttctcatcggattgaagcagtaccgtaaggagttgtggactggtgagaagtgagaatgtcggtatgagtagcgaaaagaatggtgagaatccattccaccgaaagcctaagggttcctgagcaacgatcgtcgtctcagggtaagtcgggacctaagccgaggcggaaaagcgtaggcgatggacaacaggttgaaattcctgtaccggtgtgaatcgtttgatcgaaggagtgacacagtaaggtaggtcagcacgcgattggaagtgcgtgtttaagcatgtaggttgagttataggcaaatccgtagctctaaaagctgagatgtgatgacgagctgtttacagcgaagtgattgatcctacactgtcgagaaaagcttctaggtagagacacatcgcccgtaccaaaaccgacacaggtaggcggggagagaatcctaaggtgcgcgggaaaaccctcgttaaggaactcggcaaaatgcctccgtaacttcgggaaaaggaggactcatgtagtgtgaagggcagtaacgcgtggagcatgaatgagtggcacaagagaggcgcaagcgactgtttaccacaaacacaggtgcctgctaaagcgaaagctgatgtataggtgctgacacctgcccggtgctggaaggttaagaggaggggttagacttcggtcgaagctctgaattgaagccccagtaaacggcggccgtaactataacggtcctaaggtagcgaaattccttgtcgggtaagttccgacccgcacgaaaggtgtaacgacttgcgcactgtctcaacgagggacccggtgaaattgaagtacctgtgaagatgcaggttacccgcgactggacagaaagaccccatggagctttactgcaacctaagattgaacttagttaatgaatgtacaggataggtgggagacttagaatctagggcgccagtcttagaggagtcgttgttgggataccaccctttgattaattgatttctaacaggccgattaacaaccggctggacagtcttaggcgggcagtttgactggggcggtcgcctcctaaagagtaacggaggcgcccaaaggttccctcagagcggacggaaatcgctcgaagagtgtaaaggcagaagggagcttgactgcgagacggacaggtcgagcagggacgaaagtcgggcttagtgatccggtggtgccgagtggaagggccatcgctcaacggataaaagctaccctggggataacaggctaatctctcccaagagtccatatcgacggggaggtttggcacctcgatgtcggctcatcacatcctggggctgaagtaggtcccaagggttcggctgttcgccgattaaagtggtacgtgagctgggttcagaacgtcgtgagacagttcggtccctatccatcgcgggcgcaagaaacttgaagggggctgctcctagtacgagaggaccggagtggacgaaccgctggtgtaccaattatcctgccaagggtacagttgggtagctacgttcgggacggataaacgctgaaagcatctaagcgtgaaaccagccttgagatgaggtttctcatagcataagctagtaagatcccatgtagacgacatggttgataggccaggtgtggaagagccgtgaggtttggagctgactggtactaatagatcgagggctttacttaaaacaataagcagaaatatgtgtaacaaatatatataaccttctatgtggttttcagagtacaaactctgacagattcagtggcgatagctacgagggtccacctgttcccatctcgaacacagtagttaagctcgtaaacgccgaaagtacttggctggagacggcctgggaggataggaagtcgctgattaagctaaaggcacaccttagggtgtgtctttttttgttgtatggcttcctatcctcctagtccgtctttactattctaatagcccacccttgacatattgaaaaaattagatataatagcattaatatatatgagcaactattcatatataatacaactattatgaatcctgttcgattaagaggtgatataatgaattctgtaagaacaattgaaagaattattaaagctcctgatattcattgggtaggcactggatttagagtacgtcagtacttccctgatggcgatgagtcacctatgcttgatcgtatgtctccatttttattacttgactataacgagccatattattttgaggccagtccttttgatacaggtgtcaatccacatccccataaaggctttgaaacggtaacattttctttttccggatccattgggcataaagatgcagctggtaatagtggtgttattcactctggtgatgtgcaatggatgactgcagctagtggtgttttgcacaaagaatttcatgaaaaagaatatgcaaagcggggacgtttgttccatgctttacaattatggataaatctacctgaacgtcataaaaacgatacacctgcatatcaatatataccttctaccacaatggggcggtatgaatctcttgatgaaacaatcgatgctatcgtttacaccggtgttttcagacatataacaggtcctgctaaatcgcatacaccgatgaatatttacaaattaaaacttcaacctaattcatggatctctatttctgagaatatgacttggaatacaggattccttgtgattaatggtaccggtagtgccaatggtgaaagcatagaatttggagactttgtacttttcaacaatgatggagagcgctttgaggtagaggctggtgatgacggtcttgaaatcttcgttctcgctggagaaccaatcaatgaaccagtggtaaaacaagggtcatttgttatgacaaataaaacagagcttattctcgcatatggggaatacaaaaacggtaaattcggtcgtgaagaagatattatgtaatacgtatataaatcttactccacaagatttgatatagtattacaatataatgcaatataaatacgatagcccctatcataattggtatgataggggctattattatataaaacttattttcactctcttatttaatgcgaaagcgattttgctaagtgtatcaatacttgtattataaccacgttctattctagcaatggtagactgtgggacaccagaacgttctgctaattcacgttggcttagccctgcattctcacgtgctcttaattttctgtattcataatttttatcaatttggtgtgatataatatgcataatattatgtatgttacctaaggagggtttatgactaagaaaattgcagttctagtgaacgaagacacgatgcaacgttgttcttgcggtggttgtcttaaggcatatatgaataaagtggattcttttgagcgctatgctgatgaggatactgagctagttggttttacccatagcggtggcgatttggagaagaaattggcttctttcaagaaaaatggcgttactactattcatctttcaacgtgtacgcgtggtaagaatgacaattatgaaagcatagctcgccaatgcgcggcagctgggtttgatgttgttgggtacactcatggtggtgctgtatctaaagatggtaaggtggctattgagcttgttggtgaatctaagtaagactgcgtttattttgagagacaatgagaggttcaaatatgaataagaaaattaaatctttggtactagctgccgtgatggggctttcattaacaacagttgccgtagtacccgcaacggtagaggctgcttctgcgggggctgcagaaacgttaattggtggtgcagtggcgtatgcatatgtatccacggctttcaataaaatggataattctaaggaaggccaagaacaaagcttggctcgtgcaaagaaacaaactggctatttagaggatagtgcggcgcaagcacgggtgcaacgtatcatgaagaccttagaggcttcgcctagcgtcaagcgttcgtatgtggtgtacgcaaatcctagcgatgatttcaatgcgttcgctacggttggtcgcgtgatgtctgttaacaagggcgctttggatctattagatgatgatgaactcgcttatgttatggctcatgaaatttctcatggcgagcataaggacattgtcaatggtctcaagaagcaagtaggtttatctacagcggtgagccttgctgctggcggtggcggtaatgcggctattttgtccaatattgctggtaattacatggaaaaccaagtattcacgatgggccaagaaaaggcggctgacgaattaggctttaaaattttgagcgagtctccatataatgtgggcggtgctgctgcttctatggcggtacttcgtaataaatatggtgatttgtaccgtgaaggtttgaaccaagtatttagccctaacaatcaccctaagacgagcagccgtgtaaaggacaatattgatcgcatgtatacgtattctggcaatcacgttacggtcgataatggcgcggtatttgtgaatggcatgaatatctatagccctgccaatagcggtcggtatacgggcgaagaacgagcttatttcctggctggtaaattggcgcgcttgtaccataatggtcaaattcagccaggtggtgcatcttatgatggacctactgtgaccgtggcaggtcgttctattgtcacaactcctaatgctgatgtggctcttatggttgctaccaatttgaataattcctttgtgaaagccgcaggtcctgcgaaaggcaaacaagcagcaaaacctaataagaaaaaatctagtaagaaataattgaacaacaatataatacgatagtgagatacttgggggtgtcgtagtttgtacttttaccgaagaaattgtatgaggcgtaagtgataatggagagagaccgcttatgaagataaaatggattgtactaccgtatatagtcatgggcatttgtattgctataggtttagttattgggatggcgccagagttgttaggcgatgttataccgaggcatggcgtgataggtcggatgttaacggctgcgaatcaccgaaagattcaagatagtcaacatacagagatgattgtaccggattatgtgcaacgcgtcgttaccttgggaaccggaacggtggacttggttggtgctgctggtgagccctatgttgtggccaccgatgtgtctccttatgtctctggtacagagataaagggtcgtgtacagcctacggtggagtctataaaagcctatgaaccggatgtggttatcgcaccggaaacgacgccaccaggattagtggcatcgttgcgcgctgccggtattcctgtatttatttatacgctgaaagatagtttaaaggatgtaacccttaatacgaatcaagtggctaagttgtttgataccaaaaatgcagaatattcgattaacaattctcttatgaaggtacgaaaacaggtggagcctcataaaaatgatgtaaaaccggtgattgccttgtacaatccaacgcatggggtgtaccgagctggcgtgcttcgcgacatgattgaaatgattcatggcattgatggtgcaggtaacttgaaaatcaaagatagcggtaaggaccctaatgttctatctgatgtttgggattatcgggcgagctatcctactttcaacatgcaagaaaacatgggtacaaaagcggatttgattcgcatcaatcctgatgttatttttgtgcctaccatatattcggtcaaacaacctgagtataagcaggatatagatgccattatgcatgatccggagctacagaatataacagctgtgaaaaagggctatgtgtatcctattaatgacatgcacatcatgagctattcgtcgtggatgtattatgaaatggaacagatgtcgaaatggttgtatggcgattggtcgtataagaattatgtaaaataccaaagtgtgccagctaattaacgatataggtcttatattgttgctgctagtttacagtgtattgcatgatgagattttttgaaagcataggaggagagcttatgcaattacgtcgtttgatgattgttttggctatttgtattgtggggctggtggtagcagcttttggtatgtaccgttcttggcaaaactttacaagtgggggcctatttggcatattaagctctcacgggcactatatgatggtggatggaaccagcacaacggttacattagatcataaggcagagcgtatcgtcgccgtagggcctaatgtggcggatttggtgagcgaattggccggtgattccgtagtggctactaccgcagcaccgtatcaagtgactaataccattaagcaacgggtggcgcctgatgtgaatgctattgtggcgttaaagccggatattgttatcattgaagatggcgctgaatccatagaactcgttagtccgttgcgagaaaagggcgttaaggtggcattattaagagcgcctgcgactgtgaaagacgtagaggaccagacgcgcaatgtaggtaaattactaggccgtgaaagcaaggcagacagcctcatagcgacgatgatgaactacatccgcgatacagaatcgcttcgttttgcgcaccgcgacgatccaaagcagaccgttgctgtgtataatgaaaacggattatatggtaaaccgaaaaccttgatcgccgatatgctcacctatgtgggcgtagataatgcagctgctaagagcggagtgaaacaatcttactttggtacaaaggcagaccttattaaggccgaccctgatgttatcattgtaccgatggacatacatgcaccggattataatcgcgatgcaatctatgccaattactataatgaccctgcattggcaaacttgaaagctattaaaaacaaaaaggtagccatcgtgtctacggatgccctgttggccaagagttaccatattggacgaggtatttatacaatagctcaagttgtgtatgcaagatagtgtattgataagtaagatactgtttaagtatcattatttcgtagcgagaggatgcatatacataagttttattatgatgatataacggtgtcataggatagtttaaacgaatggttatgcaggtatgaataatattcataaaattgtatagaattaataaatatgtacttgatagaggtgttatgttcagcctcttagtatgctaagaatttagataatatctgtataggcagtctatagaaaacatttctatagactgcttttttttatatgtattgagagcagataaataatttttagcatgagaattattagtgtttttatataatagacaaatgtatgtattcaatagagaaattagtaattataaaaatacatacagtaaaatatcatacctatacagggtataggtttattgtgctacgtatttgtttatgaaataataaaataacttagtgttaatcgtaatataacgattaatacagattgcatttgtgttttatacgcagtagagtacaaatttataattataagtttgaggaggttattatggagtatgcaattcatctttttaatgcgggtggcgtagtcatgtatccgctagttttatttatgttggcagcatgtacgattttatttgagcgaattcgtatgtatcgtcgcattgacagtgaaattcaacaattgtcgtctagcattgaagcaggtcgtaatgcgaatgattggattgtattagaacaagcgattaagaataatgatgatgcacttagtcaatttgtaacaccgattgttgattccgtatataactttgaaggcttggaaaaccgccttcatgatgtagtagggtatatggatgaacgtttaaaacgcggtcttaactggctcagcatgatggttactatggctccattactaggtctattgggtactgtagtcggtatgattcgctcattcgctgctgttggtggcgatatcggtgctcctaccgttattactggtggtgtatccgaagcgttgattgcgactgctacagggctttcagtagccatcgtagcattagccatccacagctggtgcacaagtaaagtaaattatgatattgcaaaattggaacaacgcttaggttctatcttggatttatatattaggagtcaacgatgaaacgtagttcagtagggatacaaaaagaacctaccatcatgattatacctatgattgatattgtatttttcttgctcgtatttttcatgatgagtacgttatatatgaatacagaggaacaaattccgctcaatttgccaaaggcctctgcatcaacggcaaaaacgattgagccgattacgatttcgctcacagctactcataagatgtatttgaacgaacgtgaaattagacctgatgatttgggcaatgaaattcaaggcatcgttgcgaaggaaccacaacaggcttttatcgtccgtgcatctgaagatattgcgtataaggatgttattagcattttggataatctaaagatgagtggtgctcgatttgtcagtgtagcgacagaacggaagtgatcctatggtgagtaaacgatatggcattccttttatcgctgcattggtggtcaatctagcatactggggtgttgtaggcgattggttcggccatataaaaccaccagaaacgccaaagaaagatttggtcatcaatcttgacatggtgcaaccggaacctcctgagcaggagaagaaagagcaagagaaaattgtctctgatgataaagaaaatgctgcgggcggtaagtcgggtagtgtattaccggatttatcgggaaaaccgacaccgggcttgcaaaatcttaacccttatctaggtggcgatgaagcggctagtgtaaatctacatgggaatacagataatccagtgggtgttcccggcgatggtgatacatcaggtccgggtggtggccccgttggcaatggtggtaaagcaaatgacggccctggtacacagagcggcaatcctgggactagtgatacggaaggttcgggatactttgatgtttccggttatcgtgctagtttagatgccaataaagtcatgccagcacaagctgtacgaagaggtattacagggacagtcaccattagggtttattttgatggcgaaggtaattatgtaagggctgaaattgagaggagtagtggttctagccttcttgataatgatgcattggcactggcggctaggtccggtggtgctaccaatacaactggtgagcctaaatcagatgttttttatataagatatgaatttgaataatgattatatttggaatgagcctaaattgaattaaatggattacagtttatataggggatatgagaaggttcatatcccctacaaccaaattcccactgtagttcggaggctacaaattaacagaattaacatagttttaataaaacatagaggatgatgaatgaaatgaataaacgtgtatatgtggccacaatgatggcgttacttagtatgagtgtaaatggttatgcggtagatatgacaactaatcagaatcaagagtcgtccaatgtaattaatgttaccgctaatcgcacagccctcctagatttggacacacctgtagcgatgaatgtaattacacctgaagagttaaaaaatactggtgctaccactgcttttgatgcggtggcgaccgtaccaggggtaacaataaattcttatggtgctggcggtgccgattttggtggcatggatagccgtacgaatattcgaggtcttgaccgtggtgcccttgttcttgtaaatggcgtgcctatgaacctcaatggcaaaggtggactcggctctatccctacgagtgccataaaacgtatcgaagtagtgaaaggagctgcttctacattgtatggtgcagaggcattaggtggtgttattaatgttattactaagactccatctacagagggtggctctgctacagttgctgtaggtaatcgtgggtctaaacgttttgatgtgtcttatggtacagataaattcatcgttggtattgatagaaaatattggggtacacaggacccatccacaccgattcgctacgactatgcaggtactaaacactacgattactatagtactcgcaacaagggcaattcgttggggctctttatgagtggtaagctttcagataaggtaacattgaattttaatcgtgctgaaagtaaatcgtcctttggtctaatcagtacggaaacaaatccggttaatcaagcaagacattctacgacgtatcattataaggatgatcgcaataatgcttccttaatttataaggacaagggtactacaggaaccttgttctataatgaccgtacgatgcgtggtacgagccgggtgcacaatacgtcccaagctaaggcgactgaaacaagctatcaagcacgtcaatatggatttgatgtacagcatgaatgggatttcagaggcggtaaggattatttgatagccggtgttacaggtaagcaagaaacctaccatgcaacggctgtacctgtgtatatccatccgaaacgcaatagttatgctgtgtatggtagttattcttatgaaattacccctaaatggacatccattttgggcttgcgttacaccgtaatcgatgatccaatcaaggatcaacatgtgttgacccctcaattccaattattgcactccatcaataaacaatcctccatgtatatgaacatagggaaagctttcacaatgcctagcttgagcgatacattccgcagcgttagccgtcggtatacagcggtaagcagtaaaaacctcaaaccagaagagggttggaactatgaaattgggtacaagcggattaacaaaaaggatgattggaaggttgatgtgttctatatggatttcaaaaacttcttccaatggcaaccggatgcaaatggtcgacctttggtgcgcgtaaatggcgggaaattccgcaacgtgggcatcgaagccgaatatggtagacgtttatccgaccgcctcaaatggaacgtgagcggatcttactctaatccaagacaaaaggaaatgaatgaaaattactggaaacaagcggcccctaaattgcaattcactacaggcattcgctatgaaagcccaacgtgggaagcaggcacatcctttagctttgttacaaaacggttgcgtaatcgagatggtggcttaaaccctaatattgccctttggaatgcgtacgtaggttaccatttcaataaggacgctacccttcgtctagatgcacgcaatttgttagaccgtcacaacgttatcaccaatggggattatgaatactggggtgacccatttacatatgaattgagttatacacaaaagttctaatatttatttatagagatttatataaaatccagtactaatagggggtatgggttttgtgtagtccttttaaatgtgtaataatacaattatgtagtttttatgaataattagtgtgtattacgagggatttgttatgaacaatcttaagaaacgacggacttctgtacttataggattggctttgatgggattatctgtgcatgcatatgcagtggatgtaacggctaccacagatactcctactacggtagcatctactgaagcaaatggcgcatctgaaagtcatgtcattaatgtaacagctaatcggatggcattgttaaacctagatacgccggcagcgatggatgttattacggacaaagatatcatgaatagcggtgctaaaaatgcctttgatgcggtgaacatggtgcctggtattacatctttctcctatggtgcatctggccttgaatatggtgccatggatagtcgggtcaatattcgtggattagaacgaggttcactcattctcgtcaatggcgtaccgatgaaccttaatggtaagggtggtcttagctctattccaacaggttctattgcccgtatcgaagtgttgaaaggtgctgcatctgctttatatggttctgatgcgatgagtggcgttgttaatgtcatcactaaaacaccaactaaggaaggtggctctgctactattggagtaggcaatatgggtagccaaacctataaaatcaactatgggacatctcgtttcttgattggtattgaacggggattctttggtaaacaagatccatctacaccagttcgtacagatacagtgattcgccctcgtggttatgaatactatacagcacgggataaggggaattccttaggtatattcatgagtggtaaattgagtgacaaggtaacattgaactttagccgctttgagggtaagtctgcttatgctcagttgagtactgaaagcaatgcgacgaaccgcgatcgccattctacaacatatgcatatgatgactctaagaacaatgcgtccttgatttataaggatggaaatacgacgggcacactcttctataatgatcgagatttgaaagggaaaaaccgtaaacatagccttccatcctatacatctaatgatagtaactatattgctcgtcaatatggttttgatgtacaacatgaatgggattttagaggtggcaaggattatttaatcggcggtgttcttggtaagcgtgaaacataccgcactacatcaggccctgtatatgcaagccctcatcgccatagtttagctctttatggtagttattcctatcaaatcaatcctacatggagtaccgttgttggattgcggtatacggacatcaaggatcctgtaaagaatcaacatgtgttgacaccacaattccaattgaatcaccgtatcaataaagaatcctctgtatatatgaatgtaggcaaagcttttaccatgcctaatctaagcgatacatttaaaacagtaaaccgacaatatcaatcggttagcggtcgtaatttaaaacctgaagaaggttggaactatgaattgggttataagcatattactaacaaagatagttggaaggtagctgcattctacatggatttcaagaatttcttctcgtggaaaccggatagcaatggccgtaatacgattcgtgtcaacggcggtcgctatagaaatgtaggcatcgaagctgaatatggtcgtaagttgacagaccgattaaaaatgtcggttggtgcatcgtattcgaatccaaaacaaatggaaatcgataaaaattattggaaacaagccaatccaaaattacaatttacagggggcattcattacaatagttccacttggacagctggatctagtataaactttgtaacaaaacggatgaagaaccgcgatggcggcatcaatccaaatcttgtagcgtggaatgcgtatgtagggtatcagttcaatgaaaactcttctatacgactcgatgcgcgtaacttgttgaatcgtcacaatgttatttccaacggggattgggaatactgggatgagccattcaactatcagcttagctacactcaaaaattctagattactataagtctgtattagaactatacaaggagtatcatcatgaacaagagcattgtgtatcttatatgtttgatggtactcctttttgtaggtgtaaccggatgtggtccgcaagatgaaacgcggaccttgccatatacccgttatgttgaaagttatgatggggcacgcgtaccagtacctgatcatccgaaacgtattttagcattatcctctgcgtcggatacgattttattaggccttgtagaaccagaccgcttggtaggtattaatacattatctacctatgaagaatattctttagaggcgaagcgtgctaagctggttaaacctgctatgagttcttatccattagaaaaaatcattgccttggagccagatcttgtcatagcacctgattatacgagcgcagacgtcattgcaggtttacgccacatgggtatacctactgttgtagtgccaaccggtactacggtagaatctgtcattaagaatgtgacggacatagctcatattgtaggggaagatgaaaaggggcaattttacgagcagaaaatccgtcgtgaactagaaaagataaaacggcttggtacatctattccattgaatcaacgcaaaagcgtactcttcgtatcatccatggatgggtacaccggaacaggcagtctgtttgatgatatgtgcaagtatatgagcatctacaatgcacctgatcttctcggtttaccgccacggactccttttggagatgagcgtgtattggctatggacccagattatatttttattccatcctataaaggcatggataagaatttagctagtcggtatcttgataatccggcctttcaaaacctgcccgctataaaagaacatcgcgttaagcctttaccggctgcgtacttatatactatgaatcagcatattggcgaagcgatgcttgctattatgcatactgtgtatcctcagttagaaaggaatcctcatgactaaacagaaacaaaaaatcatggcaattgccataattgggggattgctatgtattgtaagcctattggcgctacatgtaggaacgattatgattcctatcggtggtggcatacaaagtattttaaatggtatggggataccagttcattttacagctccgattacagctgaacaagaggcggtattgtggtttatccgtatgccacgtctcatcattggtctccttgtaggtggtgcattagccttggctggtgccgttatgcaaggcgttttttccaacccattagcggatcctggcattatgggtgtatccgcaggggcatcccttggcgcagtgatcgccattgctcttggcgtaacatctcttggtatgttttatatgcctgcctttgcctttgttggcgcctttgtatccgttggtattactattattttaaccttgcgcaataataagctcgatacgacgaccttattgctcgctggtgtagctgtgagcatgttacttggtgcttttacatcgggcattttgacgatgattaatgaataccggttgcgtgaattcttattctggatggtcggtggccttgatttccgtcgttgggatcatgtggcactagctgtagggcctatcgcgacaggcagcgttattttgatgatgctcggtcgtcatcttaatgtactcgttctcggtgacacagaggcacgtgcattgggcttacctgttatggtgtaccgtatgctattcttatttcttgcatccgttgttacagctactgctgtatgtgtcagtggttctattggctttgtaggccttgtggttcctcacattgtccgcctcttagtaggaccggatcatcgcatattactgcctatggcagctgttggaggggcattatttctcgtattctgtgatacattgggccgagttatagcacaacctatagaaattcgtgttggtatcatgacagctctcttaggggcaccatatttcttatatttactacatcgtttgcgcagcaaaggaggggcctaatgaaactagatgttcaatccttatctgtcacattaggggaaacagctattctaaaggatgcgtccttctctattgatagcggtgaatttgtcggcattattggacctaatggttctggcaaaacgacgttgttaaaaaccttgcgtggactctatcctgcatctggtggtcaggttttatgggatggtaaaagcattgcctccatgagcgataaggatatcgctcatcatgtggcatatatgcaacaatccgttaatgtgtcctttgattatgaagccatcgatatcgtgatgacagcccgttatccgtatctgaaatggtggcaacaagagggaccagaggataaagcaatcgtagaaaaggccatgaaagaagtgggcgtgtaccacctgcgtaatcggtctgtacaattcctcagtggcggcgagcgtcaacgggtgtttctggcaaaggccttggcacaacaaacagaggttttgttattagatgaaccgacggcggcgctcgatttggtgtatgctgatgatatctttcacgaaggtcgtagactatgtgacgaaggcaaaacgattctaatcgtcgtccatgatttagaattggctgccaaatattgtactaagctcgtcttagtaagcgatggttgcatcgtagatgtaggaacgcctcgagaggtgctgactgcagagaatctacgaaacgcattccatctatcggctgcggtctacgacgacccatactttaaacaacaacgtatctttgtatttccaaaagggactacggatattaaagcgtataaacagactaatgcaagtactgacatgtctatcgatccagacctgcaataagtatcttgggttagatagttagttatttttatattactaattttatttttggctacatccttgtattgcgattccgaatgaggtcagacttatgttatatccatttactgctattgttggtcaagatgaaatgaagttggccctgttacttaatgctatcaatccatccatcggtggtgtgctaattgaaggtgaaaagggcactgctaaatctacagcggtccgtgcgctagcgaatctgttacctcctatggaactaggggctgatgcaatgactgttgtagaattacctattaatgcgacagaggatcgtgtggtagggtctattaatttagaaaaggccttacaggacggggtgaaagcctttgaaccgggtattctacaggctgcccatcaaaatattctctatgtagatgaggtcaatctcttagatgaccacattgtagatattttactcgatgtagctgctatgggtgtgaatacggtagagcgtgaaggggtgagtcattcccatccgtctcgttttatcctcgtaggcacgatgaatccagaagaaggcgaccttagacctcaactattagatcgctttggtctatccgtcatggtctatggggaacatgatccagcacagcgtatggaggttatcaagcgccgtctagcctttggtgacaatccagatagttttattgaatcatatgctgagtcagaacatgatttgcgcgaacgtttgttacaagctcgtcagttgttatcgagtatcacaccaacggatgatgtattgttaaaaattgcgagcatcagcattggtgtcggcgttgatggtcatcgcccagatattacgatgatgcacaccgctcgcgctcatgcagcctttcacgggcgatatcaaattacggatgatgaccttaagatagcagcacgattagcattgaagcaccgtttacgtcgtttgccatttgaggagcaaggtcacgatgaagaccgcattgatacagtggtaacggctgtgcttgagggctagctatggaaacatctgtacaagaggccctcaaaataggccttgtaaacaatcagattcatactctcgttatttctggtggtactggtgtgggtaaaagttatatccttcgccagtgcctcgaggcatggcatattccttatcgtttgatacccatttatgtagaaaattcacaattacaagagactatcgattttgaagcgtccctagagcagggccagatgattatgtccgcaggtcttttagatgacactagcactcgatgttgggttgtcgatgatgggcacgttctggtgcctgaggttcgtcatgccttattagtagaggcgaagcgacgtcaaatactgctcatcatgactatcaatcatgaagatagaacactagatgatgcggagtgggaactcgtcgatgtgcatgtatctatggctgcacctacactagaatctcgtatagctgtgttgcaacaaaatcgagaagaaatcctatgtggtggagcatctatagcagagggtaataaatcagacttggacgatgccttatgtgaggaggaaactagctcaatagatgttatttcagctgaggatatgttatctctcatagctactaaacgagttcagaatattgctgtttcggatgctatactttcactagccatatcctatgcactacaagcacgcactgtagggcatggtgcagaatacgtattgctgcaagttatgaaatctcttgcagttcttgatggcagttcgtactgcaagcccatccatgcagaccgagccgctttatatgttttgcctcatcgtatgaagcgagatgaagcattagaatctcaatcatcacaaggggataatggaagcagtacaaacgaccaaaatcagttgcagaagaatactgaaatagcagaggactctgatgtagataactcgagtaattcgggtggagaagattctaatggtgatgaatccaatcccaatgaatcagataattccaataatgatataagtagtaccgaagatggcgcgtctaatcaagacgtattcggcaacgctaatcaagaagaaactagcgacactaatgatgctaaccctaaggaacctgatagttctgattcaagaagcactgatgctgatgtatctaacgggctatcttctgtatccttgccggatactgttgcccgtatagctaaccagatgtttcattggaaattacagtcttataagacggtagaccgccagtatcgtaagggttctggtcgtcgcctcatgactaagacaaaggatactcgagggcgcatgattcgagcctatcaagatgaacatgctcttgaggacttggccttagtcgatacattgcgagcggcagcaccctaccaacggttgcgagctgctgttaaggtggaacaagaaacacaatctacgcagtctctgctattagaacaacaagaagctaagggattatctatagtgataaaaccacaggactatcgccgtaaagctcgagaaaaacgtattggcgcataccagctctttgtggtggatgctagcggttctatggcggcacggcatcgtatggaggccacaaaatccgctattttgagcctcttaagggattcctatatccatcgtgactcagtaggactcattgcctttcgcaaggaatcggcagaggtgttattgccgttcacgcgtagcgtagagcgggcagagcgactattagactctatgcctacaggtggtaaaacgccattagctcacggtttacgcatggcctacaccatgtgcgatagattgttgcgtgcccatcgggcagaacgcattcagattatatgtatcaccgatggtcgagctacgtcgggggattctgaggatcccgtagcagaggctaaacaatgggctcgtattcttggaaccttgcctgtagactgtatcgttattgatacggagacgggctttatcaagctaggccttgctaaggaattatgtcaattaatgaatggcagttattacgccatggatactattacggcggatgatattttacgagtatcgcggaggtagatcatgagtcgtctcatgtatatttctaatttaggaaaacaaatccaatatatagaaaaggctattgccacctatcctgaattgatacagggtgaggtggacatctgtaatatgaaaaaacagcccctttgggatgaggattttgaaagccgcctacgcgctgcagatgtcgttctcgtaacgaatatgggggttggcttagattcgccatttttagaacatctagagcgttggctgtatgcacatcatcctaagtattggattgatgtggtagagcctaagaaaacagatattctctatcgcaatatagacgaaaatcaacggagatttcttgaaagctatcgccgcaccagtggcgtcatgaactatgtgcgccttattaacggtgctttcagtacaaaaccaatctccgaatgggaggaacctgaccacattccgtggcaagccatcatgggccgcgatggaaatatctacgaaacctatgatgaattcatggaggccgaaggaaatccagattggccgtccatcgcggtgtatttctatcgcgacgaatggattatgggggatattgagtatcaacaggccttattcgaagagatttataaacatcagtacaatccgattatcttttatgggcagtatggctcgaatcctcgtgtaggtattcctaatatgaagctgtccatgaatcatctctttggtaaggatgtattcccctttgatgtgctcataaatacttgtaaattctcctatcagtccttaggggcgcaaactttggaggaattaaagttacaggatgtgcctatcattcagggctataccatatacatggatgagaaaacctgggttgcagacccgcaaggggtgacgcctttggacgtgaatttatctatatcacaaccggaactagatggcgtcattcaaggtggcgttgtggcgtgtcaaacctttgatgagcatggtcactatgtgtatctacctgtaaaagaacgcattgctgctattgtagagcgggccattaaatggtctaaattacgacatattccagtatcggagcgaaaggtagctattatcttgcataactatccgcctaaaaattccaatattgggtccgctgcaggacttgatacgcctgaatcggtacgacgactattacaggtcatgcaagacaagggctataccgtagatactgtgccagaaacgagtgcagagttgatggatatagtcacatctcatatgacgaatgacaggtctatgctcactgatgagctcttagcttctgcagaagggcgtttgagtagtgatgattacaaaacgtattttgaaatgctgccagcagatacgcaaaagtctatgatcgagtcttggggcgcggcgccaggagatgtattcgtctacgatgatgaggttattatccctggtttctccaatgggaatctatggattacggtgcagccgcctcgtggttttggggagaatgtatctgccatttaccacgatccctgtttgccaccacctcatcagtacttggccttctaccattgggttcggaacgtcttcgaagcggatgcagtcattcatgtaggtactcatggttccttagaatggctcccaggtaagggagcaggcctcagtgctagttgctatcctgaaattggtatatcctcgttacctaatatttacccgtactggacgactattattggtgaaggtatccaagctaagcggcgcagctccgcttgtttagtagggcatctgtcgccaccgatgacgacagctggtctatatgatgagtttgaagaactagaagccttgctcgatgagcatagtcattttgaacaggaacatcctgagagtgtatcggatatagagaacgtgattcgagaggaagccatggcgtgtcatctcatcgatgaagaacaaggcgctacgatggagatggacgatcttattacagctgtccatgaaaagttaagcgacctaaagcatatgcagatgagaaatggcttgcacattttagggcaaggacctgaaggtgtagatttagaggaatttattaccgccattgtacggacgccacaaggggatattgcatcgggtcttgaaatcttagccgaagaattaggttatgattggtcctatatagagcaacatgcaggggacgtaaatgacgaggggattcgttatagtcacatcattgatcatatttggaacgaactgcgtgcgtttgtaaggtatgtggtgaatacaccagattatacagtgccagaacgactagcgcctttggccgcagtcattatgcgcgagtatatacctaaattaggacaaacaaagaatgagattacatccatttcgcagggcttgcaaggaaaatatgttgaacccggccctggtggggctccttccagcggtcaagttgatgtattgcctacggggcgtaacttctatggcctcgatgaacgggcactacccacaaagattgcttatcagctagggatagacttagcagaccaagtcattgctgactatatcttaaacgaacaacggtaccctgaaacggtaggcatcattctctgggctagtagcaactctagaagtcacggccagtgtttaggtgagtttctctacatgttgggcgttcgccctaaatggcagtccaatggtcgcatttcaggcctagaggtgattcctttagaagaattacaacgacctcgtatcgacgtaatgggtcgcatcagtggcctcattcgagatatgatgcctactgccattagctggcttgataaggctgttgaactggtggcagacttagatgaaccactagaagataactatgtgaaaaagcatattcacgatgatgtagattggctcgtggagcaaggtgaggatcctttgttggctactaaaaaggcgcgactccgtatcttcggtgacccgccacaggcctatggcaccggtgtaggcgccttgattgaaggtaaaaattggcaatccgtagaagatattgcgcaagtatacagtaagtggagtagctttcacatacacaaggatattcctcaggatatgaggctattccagcgtcgattaacgaccatggatgtgaccattaagaatgaagataatcgagaaacgcatattttgagtgctgacgattattatagctatcatggtggtctcattgcagcagtgcggactgcaaagggcagtgcgcctcgcgcctatgtgggggatagcaccgaccgtagccgcgttgtgatgcggtccttgtcggatgagctgcgtcgcattgtgcaaggggaaacacaaaacccgaaattcattcaagctatgatgaatcatggttacaaaggtgcatcggatatgtccaatgtagtatcccatagctttggttgggatgcgacgagcgatatagtgcccgactgggtctatgaaggttatgctaacaagtatgctttagatacaacggtgcaagactggatgcgtgatgtaaatccgtgggccttgcagcgcattgcggaaattttgttagaagccgctcaacgtggctactgggatgcatctccaaagatgctagagaatttgcagtccttatatatttccatagaaggtgttatagaaggtcgttagtatgaaacaaagaatatctattatatgtaccatagtaatgatggtacttctggtgttcggctgtggtcctaaacagctgggaactacgggcgccacacatcaggtgacggatggtaccggcactgttgttacggtgccgactgaacctaagcgcatcgttcctatcgctgctagcacagaggatatcgttttatctttggttgatccaagccgcgtagccgctgttggtacggtacctaataatgtgcccgacgcgtcggctaaggtagagaaacatgtgaaagcatctgctgagtccatgctctctgtacagccagatttagtattagtacccaattggatgtctccagatgcgattggggaaatgcgcaatatgcagattcctgtttatgtatataaaacgcctactacggtaaaagaagcaaaagctactattcatgagattgccgggctattacatgcatctgatgaatccatgatagctagcatggatgcagatttaaaaactgtagaagagctggcgaataagtatagcagtgaacgccctttagtggcattttattcgcaatttggcttaacaggcggcaaggggtctaccttcgatgatatgtgtaactacttgaaggtaaacaatgcggccgctcaaatagggttaggcccttttgataatgggacgagagaggatttaataaaatctaaccctgatattatttttattccttctgtggcctatacatcagatggcactacgccagcaacggcagaacagctttactctgatcctgctttgcagggcgttaaggccatcgccaatcgtcgtgtgtaccttgtagattcctcgcaggtcatgagttattctcaatttatgacccgagcaatggtatctatggcacaaaatatttatagtatgtaatttatagtttgatgtgtgtggaggtttttatgaaagtatcaaagaaacaacgtttatctctatatgtgggattagctcttgtatttggtagcacaattagtgcacctagcgtattagctgctgatgcacaagattctcataccattgtcgttactgcaacgcgtagtgaacaacagctttcacaagtaccagctagtgtaggtgtagtcacaggcgacgatatccgcgaacgtcacgcgactaatatgaatgaagcgatgcgtatcgtaccgggggtagatatcaatacgtacggtggtggtgtaggttacacgaattctaatgcgttccgtattaatggttccgaccaagtattatatttggtagacggtatcaatatgggcgcggctggcgtgaatccaccgatgacaattttgaaagatatgtctagcatcgatcgtattgaagtacaacgcggtgccggttctacattgtacggttctggcgctatcggtggtgttgtgaacgtaatcacggcgaaacctgaagaaggcgttcaaactaagcttcgtgttatgggtggcagcaataatcttgaacaatacgcgattaccaatgaaggtagcaaaaacgattggtactggcgcgtaggcttgcaaaaggacatcatcggttcttacaaggatggtcatggggtgcgcattccacaacatggcaacagccatactggttccttcatggtaggtaacaaaatcaatgacaaaaatgatgtgaaggtattctatgatacatatcgcggtgatgcgatgtactctgaccatatggggcgccttaatcacattcgttacggtacagaagcaagtgattccttccgtgctgtttggaataataacatcaataaacgttggagccatcaattgtacgtattagataatcattataaaactaaatatgatggttatttaacagatattaagactcgtgcgtttggcgatcaagtgacgtataaagcaaaagatcataccgtagttggcggtattgattggcgtcaagataaggtgcttaatatgggtggtgtaaaacttacgaacacatcttacttcgtacaagatgagtggaaggttgctccaaaatggactgtaattccaggtgttcgcgttgaccatcactctgcatttggtacacatacatctccatccattagcgttggctacgatgtgaatgctaaaacgaatgtatatgcagcgtacaaagaatatttcttggctcctacaccatatcaactctttgatggcacaaatggcaaccgcaatttgaaacctgaaacaggtcatgaatggagcttaggtgttcatcataaattcggtaaaacttggaacagcaatctcagcttctttagtcgcagtacaaaagataaaattggttgggtaatgacaaaccctgcagcgttctcaggtgaataccgcaattttgatacagaaaaagcatatggcatcaatgcagatgtccgtaaacaattgacgaaacatttgtctgctcgccttggctatacgtatacacatatcgatgcaacgcctacgcgcaaagctaatcgcgatgggtatgttcctaaacatgcggttaatgcaggtctcgattacaacgatgctaaatgggatgctcatttagatattcgcggtgtcatcgaccgtccaggtcctgcggctaatatcttccctcgtacaacatattggattactgatatcagtgctaactatcgcgtacgtgaaaatgtgactgtatttggtcgaattaataacttatttgacacatattatgcagaacaatctagtgttcgctatggccatgcaggtgattggtggccaggtcaaggtcgcaacttccgcttaggtattgaagttactatctaatttgctggttaagaataaaaattgataaggctgtaagctacaatgataaaactatagattttctcttgtaaaagcactataatagaatgtatctatatatatcaatgtatgcgtattacagccttatttttgtgaaaggcgtttatttagaggagttggattctgtatggaactaccggttttatccccgtatatgatggctcgcaagccgtcggggatccgcatggggcaaattaaatttttagagcgaaagaacccacctattttggttaacggttctattggtaatgttatgcgtcctatgcatcccgccatgcagcgccgactatttactctaggcggaccaaatagtcctttcagtacgggcatcgtgccatatgtaccaacaacggggaccgatgaatgtcgtgaagcattcttgcatattttgcgtagccaaggttttgatacaacaggccttaatgtactcgttacagatggcgcgtccatggcgatggaaatcatcatgcttggcgtttgtggcggtgcaggtgaagaggaacgtcctctattgatgttcaatccgtcctacacgaactacgatgcggtaggtcatcgcattggtcgtaaaacggtaaccgtagaacgacgcctgaacgagaatggcgaatttgaattgccatccattgaaaccgtggaaaaacgcattatagaaacaaaaccaggggcattgttgattattccttacgataatccaactggtcaactattcagcaaggaaactttgattgaatatgcatctttgtgcgtaaaatataatttgtggattatttccgacgaagcctatcgtgaattggcctacgaaaaaggcaaggaaacatctagtatttggacattgacgaataaggatgtaccaggtatcgaaggccgtcgtattagtctcgaaacggcctctaaggtttggaatgcttgtggccttcgcattggcgccatcattacagacaatgcgttgtgctatgaaaaatctgttgctgaatatacggcgaacctcagtgccaatacgcttggtcaatatatttttggtgccttggctcatgaaagccacgctgatcttcataactggtatgagcaacaacgtgattactatcgcgaaatgatttatgaacttcacaagggatttaaagaggtagaaccagatttcattatttctaatccagaagcgtccatctatttcgttatcgatgtacgtaatgtagcaaaacctggctttgacggcgtagaatttgctgcttggtgtgctgaacacggccgtgtgacattggatgatggcaatgactatacattgctcatggctccactaaacggattctacagtggtgtcgatagggaacacaatcctggtaagacacaacttcgcatatccttttgtgaaaacccagatcttttaaaactagcgcctgtattgctatctaaactatttagagcatacgaagcgcaaaggtaattgaaaggactataacagaatgcaattctaatgcattctgttatagtccttttcattgtatagttatatttagattgtaattatgataaaataatgataatatcatgatataaggaggtgtggatattgataaatattagacctgtatcagatttgcgaaacaagtttactgaagttgaggaaaccgtaattacaacaaattctccagtatttttaactaagaatggatatggaactatggtgttaatgagtattgaacaatattctgcattaacagatcctattgagtatgtactagatgaagctgattctgcagcaaaagaaagtaaagttagattctctggcaccgatgtttttcgtcgcgtaagggagagaatcgatggagtagaaaaataaatttaaaaggagctatattgctgaggttagcctctagcagtatagctcctttattgttccctataaagcaatgatagggagttgtgtttaggtattatctttttcatagtctagtcccttagtagatatgcctatgctttgttgttgatttagcatagaactatcctctgttgatggataggatgtgtcgtctaaggttactgtttccaacaatttgtcgatattatcggcttggatggatacttctttgttgtaccattcgccaaactcacggataactgtttcattgcgcctataataggtgtattggtcaatttttcgcgattccacaaggcctgcacgctctaatatagtcataaatgtagatacagacgattgcgatacactacagcgtttttgaatactcttaacgctaacgctgtttggaaaatcgatgagagttttagagtgtacttgaacaccgaattcttgctctgggtgctttagccacaatataatatctaaccgatgtggattggataatgctttcagaattctttgcggatccatatggcctccttgaggtaagtaccaaaatgttgagtgccttactttgaccgtggtcttgcattatgcggtcgtattatatacgcgtcttgctccgtatagagaatattacttacatttatcatacgctaatttttatgtgaaagctaggaaaatttataaatttttatgggggtggaggtgagggcttccaaaagtctccaccggccgggtctgacttcgccctacgggctacgcagggccaaagtcgtcttttgaaagcccacacctcctcgccaaaaactttatgtgctagaagagaaaggcctgcgtgggacgcaggccgtaaaggtagagtttagaagaatactcatagtgctttatttataaatctcattatatataaatagtaaatttatattaagaggattataattaaattgtatagttagttcgtgtttgtataaaatggagaagagggcgtatattgtgagctataagtctttaaatggtttaatgcgacatttacgaaatcaaggtattgatattagaggaacgacggataagcgactattaaggaatagtggatattttcatggatataaagggtataggttttttagacaacctactaaccgactggcgattcaaaattatcgtgaagttgaagctattattcgatacgatagtgagcttaagtcattgttatatagcaaattaatgtttatagaaactgccgttaaaaatattgtacttgaagaggttttaagttttatacaatctgagaatattaatgatatgtttagattagctgttgaagggtttcataattctcctacaacacttggtagagagcaaaagcaaaaaattcaacaaaataagttattgctacaaaaaatgatccaaagcatattattagatcaatataaatccagaaatactaaaattacgcatttttatgacaatcatgcttcagaggttcctatatgggctttgtttgaagttatgatgttaggtcagtttggtaaattattagctagttttactattgctgctagagatagaatatctcatagtttaggtataggagtccaatttgatacaaatcgtaaattgctatcgaactatatctatttacttaaggatttaagaaatgctgtagcacataatggaatagtttttgatgctcgctttaagtcttttaatgccacacgaagtatgtctagttatatggtacattattttaatttaccttttgttaactttgatacgataggtgattacattattttgatttcttggtttttgaaaacattatgtgtacctaaaaaagaaatcttatcttttattaaacagtatgaaaaattagtagtagatgtaagacaaaatgttaatactagagtagaatatgcaattgttccagctaatttaagtgggcgtcttagtcagttgaaattggttatatctagttgattgtttttataagttgtattataataatgttaattgcggtatgtcttttcggagcatacttgatgggctggtctcgaccagcccattttttattttcttataaaattttcatgtatctatgctatgttaaaaaggtattttcaatctgtatcgtgaatatataatatatagacttatgtaagttaggctttcataaaaaggagctgagtatatggcaatagatcgaaatgagagatttgacgttatcgtcgtgggggcagggccggcgggtgctgcagcggcgttacgtttggcggagcagcgtgtgaaggtgttggtcattgagcgcgggatggcgccaggtgctaagaatatgatgggtggtcgtatttacacgcactccttagaaaaattggtaccggattttagggaccgtgcaccgcttgaacgaaaggtgacgaaggaatgtatttccatcggtgctggcaatgagatgacgaccatcgaatatagttaccaagatgtgaaagaaaatgaagaatcctatgttgtgttgcgtgctaaattcgataaatggctggccgaagaggctgagaagaaaggggctttgctcgtttctaatgtacaggtaacggaactcatcaccgaaggggaaggtaaaaaacgtcgcgttgtaggtgtacgttgtcacgatgatgaggtgtatgcaaaacttgttatcatcgctgaaggtgctaacacagtgcttttagaagaggctggtttggctgaccctacagatcctaagacgatggctgtgggtgtgaaagaggtatataaattcaaaaaagaggacctcgagaatcgccttatgttatctggtgatgaaggcatggcatggcttacgttgggcgatatgacagatggtctactaggcggcggcttcatatatacgaacaaggacagcctttccgtaggcatggtagtaggccttgaggacatcggcttggcagataaatcagttgacgaaatgttggaggctttcaccagtcatcctagaattgcaccacttttgaaaaatggtcaattaaaggaacacagcgcgcatcttgtgcctgaaggcggttataaagcgatgccaaaattgggcggcaagggttacatcgtcgttggtgatgcggcgcggatgtgcatgaatctggggtacacgattcgtggtatggaccttgctatcgagtccggcatgtgcacggctgaggcggtcaatgtagcgctacgcgacgaaaatatggatcgcgttactaaattgtacgaaaaacaaatcaaggcgtcttggttgcgtcgcgatatgaaattgtataaaaatatgccgaaattcttggcctctaatccgcgtatttttaatgagtatcctgcatttgtaaacaatcttatgcgtgatgtattcactgtaaatggtgatggtgcggtggcattgatgaaaaaattgttacgccgcgtcaaggatgtaggcctattcagattgattcgtgatgcatggaaaggggtgcgttccctatgaaattagaagagcgtttgggcgcgaataaatattatgtagatgaaacgtgtcctcacatcattattgatggtgaaagcgtaagccgcgaagaggcgatgaagctcgtgaatggttgtcctgcaggtttatacacattgcaagaggacggcacgcttgcttttgattttgcaggttgtctcgaatgtggcacatgtcgcgtgttgtgcggacatacgattgttaaatcttggaaatatcctcgtaatgccaagggtatagagtttagacaggggtgagtgcatggaattattagtctgtataaaacaagtaccggatacgtcggaaattaaactagatccggaaacaaataatctcatccgcacaggtctgcctagtattgtaaacccttacgacatgcacgcgcttgaggcggctttaactgtgaaagaccaaattgaaggcagtcgcgttacggttgtgaccatgggccctccacaagccgaagaggcattgcgtcaatgcttggcgttaggtgctgatgatgcggtgctcgtaacagatcgtgcctttggcggcgctgatacattggctacaagctatacgattgcatccgctattcgtcatattcaacgaaccatgaaccgtcaattccaaatcattttctgcggtaaacaagctatcgatggcgatacagcacaggtgggccctcaaatcgcagaggaactcggtatggcgcaagctacctatgcttgtgaattttccgtagaccaagcctctcaaaaggcgattgtaaagcgggagcacgagaacggttatgaagtgattgaagctccgttgccattgcttgtgacgacgacagccgaacttaacgagccacgtcaacctggcctttggagctccatttacgcgaaacgatatactattaatcatattaccttgcgtgatatgcctcatattgatgaaagccgcattggccttaccggttccccaacacgggtacgcaaggtataccaaccaccgcttcgtggcaaggtagaaatgctttcatccgtcgacgaaggtgccaaaaaggtgctcgaattggcgtaccacatcaagcctgaaaagttcgcacaccttttggtgccaaatgacacaccggttgtagaggcgcaagacgatgagggcattgacgtaaatgaccccgtacagcgagctgcgtctgttgaaagcgtggtgcctagcgaacctaaggcggtagatccaaatacatttgccgcagaggccgctaaagctgatgctgtttccgaaggaggtgaccggtaatgataaattttgatgaatacagagacgtttttgtcgtagctgataccatcgatgacgtagtgcatccagttacgtatgaacttatcggtcaagcccgccgcatcgccaaggaactgggtcagctcgtgcaagtaatgctcctcggtgaaaacgtacaagctgaggcggaggagcttgtggctcatggcgccgatattgttcacgtttttgaaagtcccctcttgaaatactatacaacagatggctatacaaaggtattgacggatttctttgaagaccataaaccgaatatccttttaattggtgccaccaataatggccgtgacctagcaccgcgcatgtctggtcgcatgcaaaatggcgttgtagcagattgcactatcctaaccgtagatacagaagaaggccttgtagaatggacccgtcctgctttaggtggcaatatcttggctgaaattatttcgccaaaccatcgtccacaaatgggctctgttcggcctaatgtattcaaaaaacctgagcgcattgcggacagttggggccgtatccaacttgaacaatttgacctcaagtccgaagacattcgcaccaaacggctagattttattccattcagcaagtctggttataatatccaagaagcggatatcatcgtagctggcggtcgtggtatgggttcaaaggaaaactttgataaactctacgaactcgccgatgctatcggcggcgttgtaggtgctacacgtccactcgttgaaaaaggctggattgaattgccataccaagtaggccaaacaggtaaaaccgtaagccctaaactatacttggcatttggtatctctggcgctatccaacacgtaagcggcacctctggtgccgatacaatcgtggccattaacaatgatccgaaggcggaaatattccaacacgcgaactatgggattgttggggattgtatggaagttctcaacgatatgttggcgcatttaaaatagaacataaaaagattgggcccttagcttaattgccgtagtagaaaggaccccttccgaaaaactccaccggccgggtctgactccggcctgcggcctccgcagggccaaagtcgtttttcgaaaggggccctttctttcttctacagttaatacagccataggcccaatctttttatgtttccattaaattggcgcctacacatttgttggtaggaacagggccaaagtcgttttcagaaccctatcggttctttgcattctacattggtctattttagcgccaacattcgttgaaaatccacagtgagggtaaagtcgttttttgaaaggggtcctttctcatctctacagtgaatacagctgtaggcccaatctttatatgtttcctcttaacttagcaccgacatattcgttgaaataatataagtagaaatatggtaaaatggtgttatacatatcatagttgaatggacgtagggaggtgatgttgtgactgctgatagtaatggttatgtaggttttgatttggcattgtttatcgctgagaagttgcgtgctcagtttgtgtttgatatggcacagatggagggaaacacggcgacgtatccgcaggttgagacgattgtgtgtggtacttctgtggcggggctcagtgtgagtgaaactcgacaaatagataatattaatcgtggctggcaagccttgatagaagatttgcgcttaaagcgctttcggattaataagttagtggctatcgaatataataagttggtttctgaaagtgagaaccgcctaggatttggtggatttcgcaatgcaccagtagctataggtggtacaagttacacaccgcctaatcctttggatttaaattcctgttgggatgaattaatagctaggtgccaagagctagaggataatccgttggaacaatcgcttctattatatgccgagatggctcgtaaccagttctttggcgatggcaataaacgaaccgctctgctcatgatgaatggaaaccttattcagaatggattatgcccaattacgataacaaaatctcgtgaagtagaatatcggactgctttaattgaatattatgaaagccccgagcaacatcgcattcaattttccgatttcctaaaacaagaacaacaaaccatgctaaaacgctggggctatgaaatccaagatataaatgaaaccgaacttggtaaaacaatcgatacaaatccaaaagaaggatccactaaacataaattataattgaggccctgaattacaactttccctttccccgtaacaaaaatctttgcgggaaataaggataacgtatttaaaacaggtcctgctgggcttccaaaaccgactttggccttaccgtagagaggacacaatctgatagaggtcctgaattacttccttttctttgtttagcaatgaaaatctttgcgtttcattatgtaattcaggacctatgtatttaaagcttgtgatgataggggcggaaaaaagacttcgggtcccgcttgcgcgatagcgtgtcttttttccgcccctgtcatcactgttaaatagaaggaggaatacatatgaaccgcaaaattttcgttacaggtgctacttctggtatcggccttgagtgtgcccgtgctttcgctcaagatggagataatgtattgattgctggtcgtcgtgcagatcgcttggcggcgattaaggaagattttgagcaacaatatggtattcgtgtggatacgcttgtacttgatgtgagcaaacgtgaagatgtagagtctaaggtaaaaccagctatcgaagcttttggtggcgtcgatgtgctcgttaataatgcgggtcttgcacaagggcttgattctttccaagatagtaccgtagaagatgcagtcacaatgattaatacgaatgtattaggacttctttatgtaacaaaggcagtattacctttcatgattgataaaaacgaaggtcatatcgtgaatatgggttctacagctgggatttacgcatatccaggcggtgccgtttactgtgctactaaggcagctgtcaaaatgttggccgatggtattcgtatggatactattgctacagatattaaggttaccaccattcaaccaggcatcgtagaaactccatttagtgaagtacgattccacggtgatgcggaacgagctaaatctgtctacgctggtattgatgcaatccaaccagaagacgtagccgatgtagtactatatgtaacgaaccaacctaaacgcttgcaaatctctgatgtaaccatcatggcgaaccaacaagcggcaggctttatggtacataagaaataataggctaaatactaagcttgttaaaatgatataggtagcatttattacttgaaatcctacatcatttaggatatacatattaagtatattttaataaatataattttacaaaacttgtttttggagattgttgttatgtcaacaaaaataaagacattactagtggcttctttagcatgtgcagctattggttcctatagcattactagtgctcacgagccatctgttggggatcgttctgtgcctatgactggtggaatctcagttgaacctagggaaccaaattttattatgccgagtcctgtacatgtgttcaccacagttaaagaagcggcggagtatatgaatattacaccacagatgccaaagttgttacctgtaggctttaatattcaatctgtcatcactttagaaaaagatatattacaagttgtgtatgtctacaaatctggtgcggatccatgttataatcaagatggaggtgcatatattatatatcgttcatctaagttaactggtgatatcagtggtgaccataaaattcataaggttatagaaactgaaagtgtagatggtacaaaggttactttcaaaggcagtgacaaaatggtttatcttgcatcgtggatgaaagatggacaaaatcattctttagatttttatcgccccgttacacgagatgtggcgaaggctattatccgtaatattgttgaggaaaaatcacatacaaaataaatgtgtttttaataatttttatgttgcgggaaaggagattatacccatgattaaaaaatttgtattgttggctgtggcttgtgcgtgcgtaggttcttatggcgttgctggtgcgcaaggtactttagatgtaaaaccagatccagctaaacctgtagttgcagaacaggcagcgtctatggttggcatgccaagcccaattcatgaattcgccactattgatgaagctgctaaatacatgaatattatgcctcatctacctaaagtattacctgtaggttataatattgagtctgtaagcacaatcaataaagatgttttgcaagttgtgtatgtttaccaagctggtgaagattctactcgcaatcaagcagcaggcaaacgtattgtatatcgcgtaggtactacaaaaggtgatatcagtggtcattataacgattatcgcgttacagctacagaaaaggtaaatggtacaaaggttactttcaaaggtggtaattacatggtataccttgcaacatgggtaaaagatggtcaaaaccattccatctattttgaacgtcctgtcaatcgcgatatggcaaaagctattattactaacacagtggcacaaaaaacacatatgcaataatataatttaaaacgcatgcgagttacagtgcagtactcgcatgaatgtaagggatatatataaacagctccttttatgaggagctgtttttcgtttatttgtatacaataacgattggttattcttagagtataatttacaataattcttataatgggtagaaaaatacacatatgatttggtactatatttatcaacagaatatacatgattataaaagttggaggtatatatggttaataacataaaaacaatagtagatttagtagtaaaacgaattgatttagttaccaaatttatttctagcttatttatcatgactctttttacaaattatttgtatgactattattatgtgaatatattagatttactaccattattaccagaagtaatacaattactattacaaaagtttgagtttttcttgtattggattttgccatttctatatggtatcttggaaattttcttttgtttttggattgttagtggtattgttgaacgtgttacgtaccatttacaaaagacatattctgttaatttggggcggctaaatacttttagtaactttttatttcatcaaagtttaggtttaatcataatagtgaccattttgggtattttttatatgggaagtatatattatattttaactactgttaatcatgtaggcacattaatttcaactgatgtttataactcagcattagatctgattaatccaatcaaaagacttctcggatttaatattttatttattgatgctacaaatacacataaggaatggattgagttatcggtagaaattaataaatatattgtgactggactatgtatatattgggcttttataagaccatatatgagtacatgctataagaagagatgctaatatgtttcttttaatcaactttcataatctgcgtagttttaaaatttaatagtagatagattcttgggccttctatgttacaatgatagtaatatagagggcttgttttagtttaatgtatgctaattttaagatttttgtatacagatattgaatgactatggatgtaatgacagagaggctttcagatgaataatattattatttataacactgaagatggaaaagctaaaattaatctaatattagataatggttctgtttggttgagtcagaatgaaatagcagaattatttcaaacaacaaaacaaaatattagtaagcatattaaagctatatttcaagatttgaaattgtctgaagaaggaactgtcaactataagttgacagttcaaaatgaaggtactcggactgttgaacgggattatttacgggaaataaaagttcttgatacatatgcaaaaaaaagcggtaaatagtttttcaaaaaattggctatcaacaatgtattgatagccaattaataggtaatatgtagtttatatgattattcaatttctgctttcaaatcgataatattttttgcggctacgcaggcctggcagtcacagaattctgcgccttgagctttaatgtctttagcgtgttgtaataggttagctgcgccttctgcgccaaggatttgtgtagcgagttcagagcctgcaaagccgattgtttcatcgataagagcaatattttgttctgctacggatacgagttgttttgtaagttcttcttgtttaggtgtaccttctgcatcaatccaagactgagcgaattcttttactttaggattgctttgtggtgcatctaataatgcttgtacgagttgtgttaattgtgtatgtgtcatgatgatctccttgatataactagtaaatatgagtttggaaagatgcacttactgtcatatgagtacctgttcgtttttataagttcattatagcacctacaataattttgaatagtagaataatttgcgatagatactatcaaataggatagatttatgatgataactgttttaaatttttggggaatagaaaagaggaatgttttcacattcctctttagcttagttagaataaatctgagtggctgcccgtgcgagttaaagataatactaatatgtcatttttaattgcataaattagaagccaatctggttcgctgtgtaattctataaaccctcaatcatttcttttacattagcatatgattttgcttttacttttcctgccaatatatctttcgtttcttgaatagcagcttctgtttctgtattataacgaggttgtttaggttgaaatggaaatccgccttccattaatgatgtgtggagaaaaatattaattgcatcagttacagatatgccaaagctagcatatagtgcttctaattgtgcttttacagctggctcgatacgtaaactgatagaggccgttttagcaatagtatcacctcctgttacttatattgtaatgcaagtgctttataatcgcaatcatataattgcgaactgcaagcaaaatacttttcttttactggaggaaaaatccttataaatataagaatattaggattttaggtgatataatttacttaataaatgtagtttatttacaggggaatatataatgaaaaaggttgtatgtgtattagctacgttagcttttataggttccatcaatgttgtgtccgcagatgatttgatgagattccgtcttaatggtaattcgatttatgatcagccttatggtgatcgaaatgagtttccttgttcagatagacttggaagttgtactatgactgatgaggattatagaagcactcgtaaaggtcaatctctagaggtgtttgataccctatatgaggctaagcaacatttgaactttaaaccgcagttgctaagtggtttagagggattacgttccgtacatgtatccattgtggatcacgatgtgttacaagttgtgtatgcctatcatgagcttttaaaaggaacatattttgaccgtgtagatgatatgccaaagtatattaagtatcgcgtatcgactctatctggtaatattgcaggcgattataaggattacttacctcagaaaacagaggttgtaaatgatataattgttacctatcgaatggtggatgattttgtctatctagcctcttgggaacatggggggcagaaccatgtgtttttatttaatgagccagtttctgttgagcgggctagagaaatgattaacagtgtaggtactaattgagtttattactgtactatctttttaagcttgattagcttataatatacatataaagagagcccattaacgtgattagggcgttaggctcatctaaaactgaacaaaattatgatgacgcctaacgtgttagaggactgcactcctctatacgttaggcgtttatcgttgtactacttaactagtgcaatgatagtgactactgataacagaactatgataattacataggtaacttcatgatttgtcatagtatcacctcctcgcggagatgaacctaactcacgtcaacggactctcttcgtaataagtatagcaaaatactttttacacaaatagcgatatacagtcctctttgttgtggttgatattaaaaataatggagcttttatgaacgcagataattacaagatttcaacgttgccatatatagaaaatgctagcaatgagataatggaaaagtacaatataaaagcacaatatgaaacggaaccacctcatggagatgctatatattctatttctataaaggggaaagtattaccgttttggatttatggtagggacgttactttcataggtaatagtatggttatggtcgagtctgtaagatgcaaaacctgggatcccattgaaaccattattattgatttagagaatgaagtgtatgctagtttaaaggaatggtatacagatatttcatttgttaataatcgaatagagttttccaatcaagtggtaaaaatggataaacgaattttaaataattttgagaatttagagtggataagcttttaagagtgattgcgtagaggatttattgactacactatagtgaagtgttattctatatatgacaagggatgtcaatatgtgacatagtctcatatgaacgaaaaaatagcagggtggcagccctgctatttttattgtgctagttactaacgagaatggggttatgggacaaaacgtgttggtaaaaagtcccaaaatccttgattttactggcttcaataaggttatatcttcttagaaaatcgtgttctaagtggagggaataatcatgctggtaagatgtataaattgtggattttcttgtcaaaaatatggggaaactaaagctggatcacaacgatggcattgtaagcagtgtaacatcacctttacacaaactattgataatactactaaatgttttcatcgatttctaaattggttatttagtaaagaaacacaacaggacatgcctgggcagggccgtacatttcgtagacagatagctgatttctggcaaatatggcctatgccacccaaaattgaaacctcgagagatgtggtattcgttgatggtatttacttagctaaaaaagcttgtgttttgatctgttatgatggtgaatatgtattagggtggtatttatgtaggtcagaacagtctcgctcatggcaagctcttatgcagcgaatagcgacccccattgtggtcgtttctgatggtggacctggtcttagaaaagcattaaaaaaagtttggcgtaccgccaagcttcaacgttgtattgttcatgccgtatggcaagtacatcgttacactactaggcggcctaagacattagcaggcattatgttaaaagatttagcaagcgatttatataacgtaaaaacacaggaagatgcaaaaatatggattcaacgattatttaattggagggtgacttttaaagagtttctaagtgaaatgacacgtgatagtaatgataatttaagagctacgcatgaacgattactaaaagcctataactctctagtggtattaattaatacagagacaatgtttcgatatttagatgaaacattggtgttggataaagaatgtccgaagactaataaccctattgaaggcggagtaaacgcacaactcagacgtttattgcgttaccatcgaggaatgtctgtagaaaaacgtataaaagcggtcttttagtggtgttatttacactcaccaagaccgctttctgcaaaagaaatacttaaggtaatgccaactgatgcaagtatttctaaaatatatagttctatgaatgaaagagcccaacttcaaggcataattccaacttggggggatgccatttcttggggtgatttgcataactatgacaaattatctttcaatgattgggattaaagtaccaacacgttttgtcctataacccccaaaagaatgaggcatcgactataatcggtgtctcatttttatcgtctagttgccaacccattttcagatgagatattaataggtcgaggtattacctctagaattaatatattccctcgtgctatattacatatgagtagtatttttacgttcatatgtataaggagatactctatgtttaacttttatagtgagttattattacgtttacagaaacaatttgtatccgaacatgaatctgatttcaaatctattgaggatttgttagaagcatttatgactcaatataatcgtggtgattttaataatacgatagaaatgaaattacgtgatttatatgaggctgcagaagaggctgatacgaatgagaaatcaaggaagttatacaatgaaatccttgcattatgtcctgatgaagtagatgctaaacgagaactcatagcccttgagttacatccaagctttcaaatttatcagttgaaacagctagtagaatcgttgaaaaaaccaaagaaaatagattggaatataatagagacgcgtccttatatgcgttgcctcatcgacatggggatgatatatttagaatataatatgtataatgatgcgattgcctgctttacgccagtttttcacggagacaagcaagatcattcgggatttcttgtgtatatgatggttgcttgttgtggagctgccaactgggatcgcggccgcaaggtatatcagcgatatcttgcatgttgcgatgatatacaaaatgcatttaatcaggctccggatatcatgttgcctatgcatatgctgtatattctattggctttgcagtgtggtgaaagcaagatagcccatgatgtattagcagatcttgttgatgaatatgaagatattgattggttattacaagatgcaacgcgctggaacgattttgtagaagatcatttagaggctattatgtatatggtagaccaagtgagcaatatagattctgacccacgagaattaataagcttatatactgctatctcatttttaccaactcaattagtggattttgaaagtccattatggcagactctatatgatgcgtatgaacgtgttaccggtcgaactgttataaatcggtactctaatgatagttatatgggaaaacgcgagtccgctcatatgagccccgtagaggttgctaaaggtggggctttgcgtggaaatccggtatatgacaatatacggttcggtgcacaaattacactttcacaagccggcctatacacagtagatgattttaaaacaattactaaacaagaagtattgatgctaccgggcattggtaaaaaaacagtggaacaactagagcataatggtgttatatttaaagcctaagatgtgacttgaatttaatagcgatcctaggataacgaagggctatttgtctttttcataattaatataatccctttgatgagtatcttggtactgatcaaggggattttaaattactacagggttgtactaatttttgtcctataaccccattattacgctaatgttagagcgttgggctagttgctaaataaaagagctagaaaagcgtctaaccacttgcaaatgtagtaggcgaatacatttagcatgacggctagccaaaacaaataaaatagctgccacaaatacgaaatagacatcgtaatttatgacagctatttggcagtacatggtcaatcttatagtgtaattatttagttatattctattttttaaaagcctcaccgatggaataaattccgtcaaataagaaaccgaaggcgatgaaatagataaatgcttcaccaaaagcgatcggctcgaatataagtaataggcctaatagtaaaagaattagtgcaagccattttgcattacgtcccatgagtgataccatgctgtcggactttcttgatttaatgaaaataaagatggcttcaattaccatccagatgccgattgtgattgggagtactaatggtaggaatgcaaatccgccggatattaaatagataccgaatagagcattgataatgccgctgataagataccagccgctacgtaattcagacgataacgtaaaataatttataatagagctgaccgcactgacgaaaaagataatagaaaaaagccaggcaaaagctatgagattaataacgggatttaagagtaagaatatccccaggataatgcttacaatacccgataaaataaagaagaatttacttgaaccactcataataattcctccaatcattggtactgcctatttacactatacgtgagatcatgggggatgtcaaattgtaacgataaaactgtgttttcacaaaactcacatgtccatcctgttgacacagttctatagaataccgtataatacctttatatcttaaatacgagctatgaatgggtataaaggtttacaaatcctgctttcagagagttgccggttggtgcgaggcaatagaggttgtacgctgacactctcccgtgagctttggtggcgaatgcagcagtagtcatcgacggtggttccgttatacccgcaacgagtcccaattagggtggtaccgtgttatgaatataacgcccctttgagcaacgacagttgttctgaggggctttttttattgtaaaagtctagtaaaattactgatttgatgtatctacgttggcttcagccgaaatagcgttgaaatcggcggttttactaaactttcacaatggatagatataatacagtgttatgttttattagtatagaaaaggtgaagattatggatcaaaatcgcgtatatttcttcgatacaacccttcgtgatggggaacaaacaccaggtgtgtctttacaaactcctgaaaaaattgaaattgcgaaaggcctagtacgcctcggcatcgacgtaatcgaagctggtttcccagcagcatcccctggggattttgaagcagtacaaacgattgcacgcgaagtgaaaggcgcaacaatttgtgcgttggcacgtgctaatgaaaaggacgtacaaaaagcgattgatgcattgaaagatgcggaacgtagccgtttgcatgtattcattgctatctctgaacttcatatggaatataaattaaaaatgactcgccaagaggtattggataaggttaaatccgtattggcatatgcaaaaggtaaggttgatgaaatcgagttttctggtgaagatgcggcacgctctgatttagatttcgcatgccaagtatttggtgttgccattgctggtggtgcaacaattattaatgtaccagatacagtaggttacatgaaccctaatgagttcggtgataaaatccgctatattaaagaacatacaccaggcattgaaaatgcaattatctccgttcactgccatgatgacttaggtcttgctaatgcaaatacgttagctgctattaaagcaggtgcacgccaagtagaaggcacaattaatggcctaggcgaacgggctggtaacgtagcgattgaagaagttgtaatggctcttaaaacacgccatgattacttcggcgaccttcaagtgaacattgatacaaaacaatttacgaaagtttctaaactagtaagtcgtttgacaggtgttgtagttcctccaaataaaccaatcgttggatctaatgcctttgctcatgagtctggtattcaccaacatggtatgatgagcaatcctgaaacatatgaaatcatgactcctgagtccgtaggggctgaaaaaacagacctcgtattgggtaaacactctggccgtcatgcctttgctgatcatttggcaaaacttggtttccaatctttcacagaagagaaaatcaacgacctcttcgctaaattcaaagaattggctgaccgtaaaaaacaagtatacgatgatgacattatcgctcttgtagtagacaacttacatcataaaaaagcattcgagcttgtggctcaatactacaaattgggtgaaaaaggctatgcttacgcagacgttcgtctcatgactccagaaggtgagaaagcagatgctgccgtaggtgacggtccagtagacgcatcccttaaagcagttgaacgtgtagttggcttgccaatcagcttaaaagactaccaaatccgcgctattacagcaggtaaagatgcccttggggaagcaacccttaaggtagaatacaacggtcgtttataccatggtcgtggtatcagcaccgatatcgttaaatcaagtgtaaatgcatatattaatgcagtaaactcagtattcctagctatggagctagaacaagaggaggaaaaataatatgggtatgaccattactgaaaagaatatggctcgccatgcgggtcttgatgttgtaaaaccaggccaaatcatcgaatgtcatttggatgcggtattgatgaacgacatcacattcccaccagcgcgtaaagagttcttaaaaatcggcaaacctgtatttgaccgtcataaaatctacttggtgcctgaccatttcacaccaaacaaagatattcaatctgctacacaagcgaaagtcatgcgcgacttcgtacgcgaacatggcattacaaactactttgaagtcggtagaatgggtatcgagcacgttattttgccagaaaaaggccttatcggtcctggggaaatgatgattggtgcggactcccacacttgtacatatggtgcggtgaatgcattctccacaggcgtaggctctactgatgcgggcgttgctatggcagaaggtaaaacttggttcaaagtacctgaaactattaaggttgaacttatcggcaaacctaacaaatgggtaactggtaaagacgtaatccttgatttaatcggtaaaatcggcgtagacggcgctcgttacatggctcttgaattcgctggtgacggcgtacaacacatgactatggctgaccgccttacaatctgtaacatggccatcgaagctggtggtaaatgtggcgtattcccatatgatgaaattactgaagcatacatcaaaggccgcgtaaatcgtcctgtagaaccaattaatccagaccctgatgcagtatatgctcaaactgtgactatcgatttgtccaaattgcaaccagttgtagcattccctcatttgccatccaacacacattacatcaacgagatcgacaaagatattaaaatcgatcaagttatcatcggttcctgtacaaatggccgttacgaagacttggtggcagctgcagaaatcttcaaaggtcgcaaagtagctccattcgttcgttgtattgtaattcctggttcccaagatgtatacgatcaagctatgaaagatggtttattggacatcttcattcaagctgactgcgcagtatccacgccaacatgtggcccttgcctaggtggttacatgggtatcatggcagctggtgaaagaaccgtttccactacaaatcgtaacttccgtggtcgtatgggtcacgttgattctgaagtatatttggcaagcccttacgtggcggcagcaagtgctgtattaggccgcattgcaggccctgaggaggtttaatatggattttgaaagcaaaaaaatctggcgctacggcgacgatgtagatacagacgtaatcattccagctcgttacttggcgattgccgattggaacgaattggctgaacatgcgatggaagatattgatactactttcgctcccaatgtgaaagctggcgaaatcatggtagctggtaaaaactttgggtgtggttcctctcgtgaacacgcaccaggcgttatcaaagcaaaaggcgtgcctgttatcattgcacactcctttgctcgtatcttcttccgtaatgctatcaacatcggcttaccagttattgaaatcggcgaacaagtcaatcatatcgatgctggcgatgcaatcggcgtagatttatctaaaggtatcgtgtacaacttgactaaagacgaacaataccaaggcactgaattgccacaattcattcaagacattgcggcagcaggaggtcttgtgaactttgcgaaacatcgcaagtagtacatatccgggatggaatgtttgtttttccctccagttgccttagcggtcttcacccgaggggttcgacctagcaaagtcggttaaaacaaacattccatccctacactctacaactttgcggtatttcgcaaagttgtgacccctgttctgagggtgggtgtatttttcggtcttgcggggttccgcaatgtattgatgatgtagaggcaaggtgaagtcctcaagcgactttagtaggtcgagccccttgggcgaaggccgttaagctagctggagctttaggacttcaccttgcctcggatgaatgtagtatatgaggaaatgagaatgagcgaaaaaaatatcgtattgattcctggtgatggtattggtactgagattattgctgcagctaaggctgtgtgcgatgtggcttttgagaaagctaatgtaaaggttaattggattgataaaaaagcgggcggtgcgtctattgatgcatacggtgtgcctttgactgaggatacgattgaggcttgtaaagctgctgatgctgtattgcttggtgctgtaggcggtcctaaatgggataatgtggatccttctatccgtcctgaaaaagcaatccttggtcttcgtaaggagcttggtttgttctgtaacttgcgtcctgtaaaaatttatccatctttgcaagagtattccccacttaaaaaggaacttgtacaagatgtagatttcgttatcgttcgtgagttgactggcggtatttacttcggtgaacgcgaagaggcacaaggtgaaggtgctaacgagtttgcttgggataaagaaacatacagccgttacgaagtagagcgcatcatggacattgctatggaaacagctcgcaaacgtaataaaaaggttgtatccgtagataaagcaaatgtattagcttcttctcgtttgtggcgtaaaatcgctcaagagaaagcggcagctaatccagatatcgcaacagattacttctacgttgataatacagcgatgcaacttgttgtaaatcctgcacagtttgacgttatcgttacaacaaacttgttcggcgatatcttgtctgacgaaggcgctgttatctctggttctatcgggcttttaccatctgcatccatgggtactggcacagcattgtacgagccaattcacggttccgcaccagatattatgggtcaaaacttggcgaacccattaggcacaatcttgtccgcagctatgatgtgccgtcattcccttgatttacctcaagtggctgatgcaattgaaaaagctgttgaacaagtgctcgttgatggttaccgcacaggcgatatctaccgcgaaggcttgaaacgcgtaggtaccacagaaatggcgcaagctgttattgaacgtctataatcgtagggaacaaggttttgaaagctcatcaagtgagctaaatcatttcaaaatcttatcatatacattataatgcagaaatattatataggttattatataagagagagctagtccctctcttttttgcgggaggagttatgttatcttattttttacttgccttatctatagggcttgagttatttgctacgaccatgttgaaagcatctgatggttttacgcggccgttacagactattgcctgcgtatgtggctatgtaggatctttctatacattgacgcatgtactgaaatatattcctcttagtgttacttatgctacatggtctggcgtaggcctcgtggtgacggctctcatttcggtctttatctttagtgagggctataatatgtacaccattttggggataggtcttattgtagttggtgttgttatccttaacttgtggggcagtgtagggaattaaaactatagctagtttctatatcataaattagaatactgtagatgtagatgtagatgtagatgtagatgtagatgtagatgtagatgtagatgtagatgtagatgtagatgtaattattgggtaatatatttcaaaggaggcctttatgaattcttccatgtatcgaaatttaaccattactgcgttattgatggcattagctatcatgattcctattatgatgcctctgaaagttgtcattccaccggcttcgtatacattggctagtcatgtacctatattcctggctatgttcttgtctcgtaagatggctgcttgtgttgttataggctctacgctaggtttctttgtagctggcttccctatcgttatcgttatgcgcgctgcatctcatatcatctttgccttgatgggggcctattatattaaacatcatccaggcgtattgactggggctctatcctttgctacgttcaaccttgcttgtgctattgttcacgctattggtgaagtgcttgcgtgcctattattctatacgacaactacgatgccaaatatcgatcttatctacgtcgtatttgtccttgttggtggcgggaccatcattcatagtatagttgatggatatattgcgttatatatctataaagctatcccaggattatctaagcctgagaataaataatcggacgttatcctagcttatttaaggtagataataaacaacccgctattaaagctacatatgctcgtaaccactcataggaaatctattgtatgctaatgtatagaatttgattatctatgagtggttttttagaataattatcagatctgtacctacagatacagacttatcaatgcgatatggttataataaaaccatagttaatgaccaaggtgtgatatatgcataggtatatagataggtacatatacacagatgccacataggccatacatattgttaattgtgaaagactttcacaagaattatggaggttattatgagaaagcatataaaaaataacgtgtcttgggttggtaaaattgattgggagttgcaagaattccacggttctgattacagtattaataatggatctagccaaaatgcgtacttgattgaagaggagaaaaccgtcctcatcgatacagtatggaaacctcattcctcagagtttattgataatttggaatctgaaattgatctaaacaaaattgattttatcgtatgtaatcacggcgaagttgatcacagcggttccttgccagctttgatggaaaaaattccaaatactccgatttactgtacagaaaatgccgttaagtccttagttggtcaatatcatcatccagaatggaattttaaaactgtgaagacaggtgattccgtagatatcggcaacggtaaatctttggtattcgtagaaatgcgcatgctccattggcctgactctatggcaacctatatgactggcgacaatattttgttctctaacgatgcgttcggacaacattttgcggtagaagaattgtgggccgataaggctgatcaatgtcgtctatgggcagaggcgatgaaatattacgctaatattttgaatccattctctccattggtaaaagctaaggttgaagaaattcaaaagctcaacttgccaattgatattatcgctactagccatggtgcaatttggcgtgaaaatccattgcaaatcgtagagaaatactatgagtggtctcaagcataccaagaagaccaaattacagtcgtatatgacactatgtgggatggtacaaagaaattagcccataaaattgctgatgagattgctaaacaatctcctgatacacgggttaagatctttaatatcagtaaaacaaataaaaacgatatcatgacagaagtattcaaatcaaaagcgatcgccgttggttctccgacagtagggaatagtgttatctcttctgtagctggttggctcgactttttacgtgaattgaagttcaaaaataaaaaggctgccgtatttggtacctacggttggtctggtgaatctacgaaggtacttcgtgaagaattaactaaatatggtttctccgtggtagaacctgaaattaaatgtaactggaacccagatgtagatgattttggtaaagcagaagaacttgtaaaagctttattagcataatcattgcttatatggcaagacattaaaaaaggtgtaccaacacaaatcaacatgttggtacacctttttttatatagtagcttctagttagtatatgtatcaaacacaaaatctataattgtccgaatggtttcattagctcctataatcttgatttgtttatacgatttgagtcctagaattttaattggatctgctaataaagcggttaagaagctgtgtgtagctgttatagcgtgagagaaatcaaggactacggtttctcctttttgtatagccggaataatttttcgctctctaagattaatggcctctaatttgacttcacatcgttctccacaatagttgtacatatcaatatacaattcgggagcgcggactatattatttcgtttagctacagtttcggtagcgtgttttctcaaatcctctaggtgtttatgaaggtcatatgtttttaatctatcaaaaccaatggtcatgtatatgaatgtgccaggccaagagttgtttagcgttgtgtatgttacatctagtggagaaatatgtgcgacaccatcgcctgatacgatatacatatctgcttctaatgttttgccaagattactagacaagtacaggcccatgcctgcattgttttgttgcttgtaaggacctacgttgacgccaaatgtaccagagatttcaggctctagtgccatagcgatggcatctgtattgtttgtgaaaggtgcataggtttgctctaaatgtgttttaatacctacaccaagatcagcaagaataaatgatagttggtttttatctcgataccagttaaattgtaataatgatggaatctgaggattaaaaccgtgttctaatgcattatatgttagttcggatatgatataacgaactgcatcctcatatcctctaattaaatctgtaggtaagtccatagcataatcacgaattgtatttagcatttgcgtaatattatgatctttgtatttgatggcgaagagtggtttgttgtagacgtagtgaaagttattttgggaattatttagaatagagaggtagtttggaccatctaaacgattccacataatatctagtgtggaatgtttaggaaattggatggaaataaatgttttttgttgttttagtttccataaatataagattagtagtgtgagtgtttgatagcttgcatgtttgcattggtttccatcaataataattttggtatttgaataattccatttaaataaagatagaattgaatcaaattcggtaataccattttgaataaatgagaatgcttttggtagggggatgataggggttccttgttttgtgcgtagtgtgttagtcatgtttctctctcctttaattgacaatgattaatcactattgctatactaatcgtatagaataacactaaggggggccttgatagagcgaaatgtttgccccacagttattatgaaacatcatgtttcatgccccatactttgtatggggttttcttatacctatattatagaactaatgtttgtaaaaacaagagaaatatagctattatgatttattgatacatatctactattatttcatgatttttgcagttttatcataccgttccgaagtagtttcatttttctgtatgtccagctatttcctcatcttgaattggatgtattaattttatacaatatctgtaatattaatttatcgggatgtagcacgtttaggagagatagatggttggtcagaactggtggcgccgcataggtttagttatgtgtattgcagcgagtgtaggcattgtaagtggctgtgagtttaatatggataatttaaggaatagcagtcaggtgaaagctacgcaaagcgatagtgaaaaggaaatctggcgtgtttttaaattttatttagctgctacgaatgagtttaattttgatagtgtgaaatatagtcatcaacatgtagaaacggtgcagcaagtacggcaaaatgtaccgttagctgcgtttaaggtgcgagattacgaacgtcttgagcaagaactcatcgctgcgcgagaagcggggcacacacatagtgacttggaagcagctacagatgctttattaccggtattgcacgacgttgtggtggctgtaaaagagttagatacgtattataaagaaaaacgctatgaatcagataattatgcatttgctcatacgcagttagagaaactttcaacattaatagatgcatttaggccgaaatatgatgcggtagacacaattgttaatacctatcataagcaggagggtgaacgtcttgttaagctgatgcgcaacaatgggcagacgaagggcgctaatatggcggaaatgatgcttatctatagcgatatagtagatcatattgtggagcataaatccgatagtgatttccaatgggtgaaagaacagaagaaagcagccgatggaattggggcaaagattactgctgccgaggctcagaatcgtttagagcaaaagaaacatcttgataaagcgattgaggattttattgctgatcctcgtagtgaaacggaagaagccgtggttgagcaatataatgaaatggtaagtagtccaatgaattttgcattattagattctgtgcagaagccgtatgtgccgcaagagttataatgtgaaatggtatatgttaaacatgatataaatttcgggtagaatatatttgacaagctacccttatgagccctataattatctattatatgaatattgcgttgaaaaagacggcacgtctcagacggatttagtagagaccaaactcatgggctgaaaggtttggaaatctagagatgtgcggatcactttggagcaagcaggaaccctgccggtgaacaccgttatatgtctaagtggctttcacaaattgaagcctagttatttcgtatgctcggaatattctagctttcacagaaggtcagtagggtggtaccacggatattacgtccgtcccttcgggggcgggcgatttttttatgtaaaaggagcacatcatggattacggtaagacgttacatttgcctgaaacagaattcccaatgcgcggcaatttgcctaagcgcgaaccagaaattttaaagttctgggaagacaacaaaatttatcaaaaacgtttggaattgcgtaaagacgcaaaaccttttattttgcatgatggccctccatacgcaaatggtaaattgcacatcggtcatgccctcaacaaaacgttgaaggacatcatcatgaaatacaaaacaatgactggtcattatacacgttacatccctggttgggatacgcatggtttgccaatcgagcatgcggttattaaaaacactggtcttaaccgtcatgaaatggcgccattggacttacgcaacaaatgtaaggaatatgcattagaatgcgtagaaaaccaaaaacaagacttcattcgctttggcgtattaggcgaatgggaccgtccatatttaacattgcgccctgagttcgaagtaaaacaacttggtatcttcggcgaaatggcaaaacgcggccacatctataaaggtcttaaaactgtatactggtgtacacactgcgaaactgcattggcagaagcagaaatcgaatacgctgagaaaaaatccttctctatctacgtaaaattcccttacgtatccgagaaaaaggtaacattgccagctggcgtagatccaaaacaagcatactccgttatttggacaactactccttggacaatgcctgccaacgtagcaatctctgttaaccctgaccttgaatatggttgggtaaaagtaggagacgaatactacttgatggctactgaactcgttgatgcggctatgaaagatatcggtatcgaagactatgaaatcgtaaatcgcttctctggtgcagatttagaattggctgaattcaaacatccatttgttgaacgtaatgctacagtattgtgtggtgaccatgtaacactcgaagcaggtactggttgcgtacatacagctcctgcacacggtgaagatgactttaacatcgttatgcgttataacaaggaaggcaaaactgaacttcctatcgtatctcttgttaatgaaactggtaactacactaaacaagtggatgacaaccgttatggtgatactgaattcccattagctggtgtagaaatccacgatgcagaggtacctgtaatcaaaatcttggcacacaacaatgcattgcttcacaaatctagcttgcgtcaccaatacgctcactgctggcgttgtaaaaatcctgtcatctaccgtgctacagaacaatggttctcctctgtagatggatatcgtcaacaagcacttgatgcaatcgacaatcaagtacaatggattcctaaatggggccatgatcgtatcttcaacatggttcgcgatcgtggtgactgggtaatttcccgtcaacgtatttggggcgtgccaattcctatttactattgtgaaagctgcggcgagcacattatcaacgatgatactatcaaagcattacaagaaaaagtagccgtagaaggctccgatgcttggtgggctcacagtgcaaaagaattgttacctgaaggttttaaatgtcctcattgcggtcatgatgagttcaaaaaagaaacagacatcatggacgtatggtttgactctggttcctcttggtctggcgtacttgaagttaacggcttagatgtaccatgtgctatgtaccttgaaggttccgaccaacatcgcggttggtttaactcttccttgttaactgcagtagcaacaactggtaaagcaccatacaactccgtattgactcatggcttcgttgtggacggcgaaggtcgcaaaatgtctaaatctgtaggtaatacagtagcacctagcgacatcatcgacgtatacggcgctgacgttatgcgtttgtgggtatcctctgcggattatcaagcagacgtacgtttgtccaaagacatcgtaaaacaattatccgaagtataccgtaagatccgtaatacattccgcttcttgcttggtaacttggatgacttcaatccaaatactgataaagtggcttacgcagatatgtccgaattcgataaatgggcattgttgcgcttagaagaagtacgtcaaaaggttactgaagcgtacgaaaactatgaattccacatgttgtaccatgcaattcataacttctgcacagtagacttgagctccatctaccttgatgtaatgaaagatactatgtatgctgaaagcaaaaacaacgtagctcgtcgttctgctcaaacagcaatgtatgaaatcttgaaaacattggtagccatggtatctccagtactttccttcacagcagaagaagtttggaaatacatgcctaaagaagatggcatgcctgaatccgttatgcttcaagattggccacaaggtcatcctgaacacttcaaccaagaattgtccgataaatggagccaattgttagacttgcgtacatccgtacaaaaagcattggaacttgctcgtcaaaacaaaacaatcggtcacccattggatgcatccgttacagtatacgctgaaggtgctgcatttgacgcattgaacgctcttggtgaagaaggcttagctaaacttgttatcgtatctgaagctcacatcgtaaatggcgctgctccagcagaggctgtaaaagacgaagaaacaggcgttgcaacagtagttgctccatctgaacttgaaaaatgtgaacgctgctggatccaccgcgatacagtaggccaagatagcgaacatcctacactttgccatcgttgtgcagaagtagtaaaagcgttataattccacaatcgatttaaatacattgtcaaaatagccccttcagaaggctccatcggccgggtctgttcctttggaacagggccaaaagtcgccttctaaaggggatattttggtatttcacttaaaaattttttagatttatgaattcattgtatactaccattctccttaaatacttgatgataattgttatcggccgattttcctcatgaaagctttatgtgtaaaaatctactcgtttcatattatagttaaaatactcgtttatgatatttatagttagtttagtaaatgagtgtatgagaaggaggaatatgcaatggtagtaacaatcattaaagctgttatggctgctcttactggtttggtaaacgcattattgcctttatttaaataataaagttcccaaaaccctcataaaccctcaaagcttgagtatttatactcggctttgagggttttttctttgtgtatatttttacttacaatagaatgaaataatatacagatttgagatttaaacgatatttattgttggtttaaatataggtagtttttgttgactatatctaaatatatacatataataaaaatgaaataaagatgaatatatatcttagaactatatatagagggagactgagagacatgaaaagaatattagttgtaaaagctatggttcttggggccatagcttgttctattaatgctattggatttgcagcgggtgtagaggctacacctatacaagatgcaaccaatatgcaacaaaataaacaagatacggaaaaacatgaggcagtgcaatccaattggatggaccgtacagatattaaggttggcacacaatctaagatgggcactcaagtatctgtagaaacgttacaaccgttaactcattatgatgaaaactccaagtccgtattgtttgtacaaggcggcattggcagaggtggtcaagaacattctgctagttactatcacggatataatgagatttggtatccttataatcctgcaacgggtaaaggtgatcaacggtatagagcagagaagtatgaaaatacgaagtcattaggtgctgtagctaatgtgggcttagggtatcgccatcttagtaagaatgagcatgcttatgttggtgttaatgcctttgttgatcgtgctttttcagaaaatgctaatcgtgtgagtggggggctagaatatgtggccggtcttaacgaagttcgtgctaatgtatatagaggcttagggagtgtgaaatcgcaatctgatatgatacatttaccgccatcgtacttcacatttgatttagatggtggcccttcttactatatgccacatacgtctcaaaaggtattatctggatatgatgtaagttatgctcgtacatttaaaaatgcccgttgggcccgtgtacatgcaaccgtatatcattggaatggtcttagtgtgcctaatcatagcaacgcattattgaaaacgcttgaaattggcaacagtcacggatggaatgtaggaactacattgcaagtaacgccacatgtatcgctagatttaggctatacggcggatagcaaagatactagtggtgcttatggatttgttaaatatacattgggaacatccaagtttgcttggcatggtggtaaacatagtgatgataccattacgaatgctcgcgatagaatgctagataaggtagaccgtagtcctatgacaataggccatacatatgaagaagattggtatgtaagacctaatgatcacttataaaattgatgatatttataaaactaaaaggagagaagtttagtaatgaaatataagttggtattaacatctatggtcttgggggccatagcgtgtagcacgagtgccgtagtgggagcggccaatgtggcgtcacaagtaagtgatacagaaaaacatgaggcagtgcaatccaattggatggaccgcacggatattaagttaggcacacaatcgaaactgggtaagcaagtatctgtagaaacattgcaacccttaactcattatgatgaaaactccaagtccgtattgtttgtacaaggcggcgtcggtaaaggtgggcaagaacataaggttaattattttgatggtagtggtggcatttggtatccatacgacttggctacaggtactgtggaaacaaagactaaaccagagcgacatgatgagacaaaaactttaggtactgtgggtaatattggcttagggtatcgccagctcagcaaacatgaacatgcttatgtaggtattaatgcatttgtagatcgtgccttctctgagaatgctaatcgagttagtggaggcttagaatatgtatcagggcttaatgaagttcgtgttaatgtatatagaggtttgggaaatataaaatctcaatcctatatggtgggtgtacctgaatcgcatctcccatttcctttgaatggaggaactgctaattacacggtatataagtctcaaaaagtattatctggttatgatgtaacttatactcgttcatttaaaaatgctcggtgggctcgtgtgcatataggctcttatcactggaaggggctcggcatttcatcatatagtggggggacttctccgatttctgatcttaataatagttctggttggcaagtgggtactacattacaagtgacaccgcatgtatccttagatttaggctatacatcggatagtaagtatgctagtggtgcttatggatttgttaaatacacattggggacatctaaatttgcttggcatggtggaaaacatagtgatgataccattacgaatgctcgtgctagaatgttagacaaggtagaccgtagtcctatgactatagacaagtcgtatgaagagtattgggctgtagtaccttgggataatttataaaattaaaaggagagaagtttagtaatgaaatataagttagtattaacatctatggtcttgggggccatggtgtgtagtacaagtgctgtagtgggagcggctaatgtggcgccacaagtgagcgatatagcaaagcatgaggcggtacaatccaattggatggatagaactgatattgctgtaggtgtacagaccggaggccagtctaaattagataaaggacactttctaacggatgatttggataccatttataataagcaatctgattacggcaatctaacgaaagcctatatagaaacattgcagcctatttctcattatgatgagaacagtaaaagtgttctatttgtacaggggcgcattggacggggcggtgagaaaatagcatcgaaagagatgcgtggttactttctccctgaattaacaatcaatcggcatgggcaatctagttacactaaaataaatacggatgaaaaatcatcagaaacattagggattatcggtacggttggtattggctatcgacgccttagccgaaatgaacatgcctatgtaggtgttaatgcattcgttgatcgagctttcacaggcaattataatcgcatcagcggtggcgtagagtatgtaaatggacttaacgaagtatatgctaatgtgtataaggggcttggtaatacgggcgtcgtaagaggttttggtggcaacccgtaccctaaacgcttgtatcctaatggttacccatcaacatttccgtataatacgattcctagtgaaaactataatacttacaaaggcggtagagcactgggtggctatgaaatcggttttgctagatccttcaagaatgctcgctgggctcgtgcctatgtaaatggatatcgttggaaaggccatggattcggtcatagtcaagaatataattatgggcgtccaggccattgggatgtgccatggttttctgtgcggaatgcaaaccactataagggcattaaaatcggtgctgaattacagttaacaccgcatatatccttagatattgggtataacaatgcaaacaatatgtcgaagggtatgtatggtactgtgaaatatacattaggtacatctaaatttgccttctggggtggcaagcatagtgatgatacgattactacagctcgttctaaaatgctaaataaggtacgtcgtcaagacatgattgtagaatcctttgatgacattgaatatttttatttagcacctattgatcatttataatatggagaaaatgttagttttatcattgtcatgagaggggactatatataatgtcaggtaagttattattgaaagctatggttttaggggctatgactttcagcatatctacaataggaatggcagcagaggttcaagcggtaaatggcctagattctgcacagcaaataactgcatccgatgcggctaggaaagaggctgttcgttctagctggatggatcgtacagatgtggtagtcggcgttggtatgaaaaattctgaagagtcgagtagccatcaataccataattttatgccttggcaaaatcatcctattgtggggacttctgataaatccaaatctacagaacttaacaagttatacattgagacattacaacctgtaactcattatgatgaaaatactaaaagtgttgtctttgtacaagggcgtataggtcgtagtggtgaaaaaatatcctataataaattaaataactattgggttccagatagacctgcaggaacgtttacggtacataacaggcaaacagataaggaagaatccttaggtatgaatgcaaatattggtattggctatcgtcgtcttagtaaaggtgaacatgcttatgttggtgttaatgcattctatgaccacgtatttaaaggtggttataagcgcgttagtggcggtgtagaatatgtggcaggccttaatgaatttcatgctaatctgtaccgaaacttggggactgatgatagaaaatatatagggctccatgggagaagtatcagatggtatgatcctacaggattgtatccatacggtagggattctgatactagtctttataattatgctaaggttgattatgaaaatcattggatgttatcagaaaaggttgctgccagtggatttgatgtaggatactcacgaacctttaaaaatgctcgttgggctcgtgtctatgcggactattataattggcgtggtagatcccctgtgaaagttggctattataaattaaatcaacgggatgccataaaaggttttaaagtaggcgcagaattccatattacaccacatcttactcttgatgctggttatcaaacggcatctcatcatttgagtggcccttatgcaaccttgaaatatacaattggcacatccaagtttgcttggcatggtggtaaacatagtgaaagtactattacaacagcacgttctaagatgcttgataaagtacatcgtagtgatatggttgtacaagaagttgaggaagaaacttatgatcatggcgttgtcgatgtaggtttataatttgtaacaacatagttttaatataataaaaagaacgcacagaggcctaggcattcaattgataagttgaatatcggggccttgtatgcgttcttttaatttttatttgctattgcaaatccttaggtacgctgagtggtttccagttatctagttctggaatgtctaaggtcgtaatggtccgttgtatccagtagttcaaggatacttcgttgccaaagtactgttcaaataggtatgtattaccgggaatgtccttttgtttgccgtgttcgtcaacgatgtgacgcatggattccttgaggtacagttgcaccctaaatggggtggaccgcttgcctttgaatatgaaataggatggaccgataaaatcgtgggtacgaacgttgatttgctcgtatcgattgctcttgaggccttccaaggatgcttgaatcatggcgttggcgtcatcgtattcttcgagtaggaacggttcttgatcgacgtcgagtacatagtgccacgtcggtttttcttcatctgtttcgatggcccatgcatctgaaagctccggtaaacggtggctttcataaagatcatgccacaaattgtgggcatcctctacattgagcagcgatttatagataatctcatgcccttcggctggatcgtagccgtacaatcgaacttgataggtgttgcgtggtatacgtttagtctccagtttatagatattccgcaatttgtctggaatggttaggaaatgattgtaaaagctaagcaccaccatatcttgtgtggatagggccttatcgatggtttctcggtcatataatgtggtatcccactgaaagccattcatattgatagataatcgggctgcattgtgaggccatgtggtaggggccgggcgcacggttgtagaggattcagtaatgccctctttataatgccaatgaccgtctatcttttcgaaggcttctaatcgttctgcagcttcgtcatctacaggaacatccttaatttcttcgctacgattggcaagatgagacacaatgtactgatgggaaatttcataataatgaactgcactgtcgaggtcaggcgttcccgtcacatatcctttttcataggcatagcccaaggcaacgcgtgtaagtgcgcgggtgatgtcgtagaagagcacgcggtcctcctcttgaagcgcccgtttttcttcctctaacacgcgagtcaaagactgaacggcaaatcgaatattcttggtcacaccgatgccgtgaatgcgcatgtaactgatatacggcaaggagaacaggaaccgatcctttgtcgccgccatatgcgtcaaatcggcgatgagaccccagtcgagcgggagccctccaatgtgaaagatatagttaaatgcagcttgcaacgctgcataaccggcgtcattaaagtcctttgtggctgcctgttgatacagttcagtagccttgattgggtcgtatggaatagccgcacgcaactcaggttgctcgtaaaaatgatagtaatagtcagcgagttctgcgatacattctggttggcctaggtcagcaccctttgtaaaccatgtgaaagcctcggtaaattcgcccttttcatgatggtcgaggcccgtataaagcatcatggtggggttgcctaattcagcggccctacgtgccacacggcgtgcattgtcataatcgccttcgtcgatataaatattgcgcaagttcccttggaacatggctagcccttgatcgagggctttgttaaaccagtatttcgcatgctcatgggattttgcgtgtagcgtttcttcgtctaccatgccgcgcaaggtagcgataccttcacgtaaactcttgctgcgcatcgcttgttgcaatcgttgactaaagctagccttttccggacctaataattgtttagcctgattaataacgtggtaatcgccccagaagaatacattgcctataatatattggcagtatgcatcgtcttgctttgcgtaatcatagatgatgcggaatgcatcatcaaaggacaactgcatatcgcgcctcaccgtaggcgtaatcgacccagctatgcgcaatgcttgcaatgtaccaattggactattgcggcggatactatcatgcaaacattgatacgtgcgcatattatcctctggaaaacccgactcggcccacgtaaatcgcggaccagcatatacgcgtgccaatagggcatacgcatcacccaattcacgctcctcaggagacaaagctttattgtaaacttcctcagcatccgattcgcccgtactaccttgcgatgtagctgtgttgcgtaactcgtgctgaattggctttgtcacattcgattgattattcacaatcgtctctaacatgcgcagaccctcttgagcggactgcggatcataagacataaaaattaagtggaagacccgttggaggcggtctgtgaaatattgagccataggccctcctttcgtttttatacaatacactactattatataccgaatacacagctcgtgaaaggtaggaaaggtgatggggcctctgaaagccgacacgctactgcgctttgcggagcccgaagtcgttttcagaggccccatcatcttcaactatctcgttctatgttaattcggtatataatagtagtgaaattgataaaatccgttattgcccacccaaccgagggacaggagggcctacggcccgtgtgacgatgtgccctgagaatctccaccggccgggtctgactacgccctgcgggctcacagggccaaagtcggatttttgggcccatcggttctatctctcagtccatagccgacatgcggaatataatagtagtgaaattgataaaatccgttattgccaacccaaccgttaggaaggagggcctatggccagtgtgacgacgtgtcctgagaacctccaccggccgggtctgattcgccctacgggctcacagggccaaagtcggatttttgggcccatcggttctatctctcaatccatagctgacacgcggaatataatagtagtgaaattgataaaacccgttatcgcccacccgaccgttggagagataaaaataatttcttagtcaggttagagtggatatgaaaaaagacaccccgtgaaaaaacgacttttccagatgctgtggatttttctttggaaaatcttacgcctctggattagcgatgtgtggctcccatgcgtcgctatgctcctctgttagctcacaccctgcgtcggccctgacctttcacaacaaaaaataattgattaatgtacatagcgtaaaaagagaacaccctctctgaaaacgacttcgggctccgcgtagcgcagtattctcttatctgtataacaaagaaataatttctaacacgtgttgtagaatgcaaaaaaagacacctggcaaaaaccgacttttggccctgccccgaaggggtcagacccggccgacggaggatttttgctaggtgtcttttacatgtattcaaaacaatgtattagaaattattttttgttatagtcaccaaaccatttatcatagattttttggtatgtgccgtcttctttaagttctttaagtgctttgttgattgcttgttgtaattctgtgttgccttttttaacaccaagtactgtgccaggagcttttgtaggttcgcctacgagtttaaggtctttatcagcgccttgttttaggtagtacatagcaactgcgttatcgatgattgcaccatctattgtaccagctttcaattccataaagatattggcattggagtccatttcttttactgttgtgttaggaatttttttagccatgtctgcaggaacagtaccgatttgaacgcctacagttttgccagcaagttcgtccatgttgtggattgtggagttgtctttgcgaaccactgtgatgaaaccgccttggtcaaagtatacatcagagaagtctaatgctttttcacgttcaggagttgcgttgatgcctgctgcgatcatgtcgatgtcgccagattgaactgctggaatcaaagcgtcaaagcccatggatttgaattccatttttaggcccaattttttagcgattgcttcggacaaatcaacgtcgaaaccaacgtatttatcgccttcagtgaattcgaatggtgggaatgtagtttcagaacctacacgtaatacaccagcctcttgtgtcattttgcttttttcactgccacaaccagccaataaacccatagcagcaacagctacgagtgcgatggctgttaattttttgaatttaaacatagtatcctcctcaaacacgatacaaacatattaatctgtttctattgtacggaattttgaaccaataggcaataacattgtataattaaaggtacgtaaacaaattaagtacacgaaatgtaccttttactaaataaggtcgattatttatacacacatttaggaggacctatgtctcttactgaacaattttccagtgcttctgaaagcttcgcccaagaggctttcaccattaactatacattggcgaagaatccagaactgtctagtcatgaatttaagtctgttaagacaatcggtgctgtccttgaaaaacacggtattcctgtgaactatgagttctgtcacttgccgactgcttttaaggcgtctgctgtgaaagtagataaccctaagggccgtttagctatattatgtgaatacgatgcgctcccagatgtgggacatgcgtgtggccattgtgctagcggatctatgagtgtactagcagctcttgcattgcataagatgcagcaagaaggcgtagctttcaacatggatatcgacatcattggaacccctgatgaggaagcgatgggctgcaaggtggatatgtgcaacgctggtgtgttcaagaattacgattttgccattatggtacatcttgatggcgaagaaacacggccgaattcacaatttttggcccttgattgtttccgcgccaagtaccacggtaaaccggcccatgcggctggtgagccttggaatggcatcaatgcggtaaacggcgtgcaactcgccatccatgccatggatatgctgcgccaacaagtgcgaccagagtcgcgcatcggaacgtggatcattaacggcggtaccgcatccaatgtcattcctgcgactggtgaattagaggttaccgtgcgtcatacagaacgtgactatttgaacggtttatctgaacagattaaaaaaatctttgaaggcgctgccctttgcactggtacgactgtagacgttgagttttacggtaacccttacgatgatatgaaccaaaaccatcgcggcacacacctcatcgaagaggtgatgaccaatatgggccttgattttgaaccaggtccagctgatattgggggcagttccgatatcggtaatgtcagctatcaatgtgcagcattccatcctaaattgcgcttggctggcccagataaggtgtgccacgccaaagaatttgcggacgctatgctcgaaccaaccattgaacaaaccattgtagatggtgctaatatcattggtcgtacattgttgcgcttggttgagaatccagctgttttagaagaaattgtagccgagttcaacagtactaagtagtttctaatcgagattcacaatgttaataaagtgcttcctatatctatcgggagagctgtaatatcgtagatagaattcggtatctgtttcagagttattgataatagatgataatgaaatactgccatttataaagctacaatttttggtaaaataggcacctacctcaacgtcgtggtgatagagcgcccatactacgtcattgccagcgatgaatggaatgtacttgaattcaaggaattcaaataaaccggctatggttatatcatcaggtacggtgaattcttcacgatgatgactcatatcatcagccgcacaaacggcatctcgatcgattagtatatgcatatgatttcacatcctttgaaccgataattctataaatttatatgcttatctttattgtacatcaagtaaaaattatattgtattaaaggaggttgtatgtcttcatctgaaccattagacattaaaaattacataggccttactagtgatacgccgattcgattcatcgcgtctgacgtggatggcacattggtgaatgatgcgaaatctgtggaccctgaggtggtatctgctgttcgtgctgctcgtgaaagcggtatccgcgtggctatcgcatcgggccgtgcgtggcatgagatggacgatgttatcgatgccatgccgtgcttgcgctactttgtgtgtaccaatggtgcctatgttatggataaagaggggaaaaaggaactcgttcatatctcctttgataaaactcgtgccatagatttagtacggaaactcatgacctacggtgtgtttgtagaggcttatgtgaaagccgaaattttcggccaatatccaacagttggcaatgaaacattacaagcggagcgtttctttagaccgaatattagaccatttatcttgaaaacgcgcacgatggtacctgatttattggcacatctagaatccttgccagaaggaccggagaaaattcaaatcttttacggcgatgaacgtatacgcgaacgcattctagctgatttacgcgatgactttcagggggcagccacagatggtaaggggcgcgaacgtttttacgacgttcttgaatcaagcgaaggaaatttagaatttgtattgcctcatacgacaaagggcacggccgtagaggccttggcgaaccattggggctatacgcctgacgaagtgatgaccattggcgatagcgaaaatgatctatctatgatccgttttgctggcgctagtgtagctatgggaaatgcacgagataatgtgaaagctgccgctcgttacgaaacaacggataataacaattatggtgtagctcgtgcactctattcggccattgcacataatcgtgaattagaaggtaaataaaattaaaatctaatagcgagttgatgataatccctataattgatagcgaggtgatgtaatatgggcaatctaaaatttgatatagacgatacctgcgttaaatgcggtgcctgtgctgaagattgtcctgtacaatgcatcactgaaggaaccacaaaatttattattggcaacggctgtatcgggtgtggtgattgttattcaatctgtcccgttggggccgtacaaatgcataagctacttaaagatagaacaggcctgtagtaatctgaaatgggtgtgtaatagactctctaaaaaatagaacaggcctgtagtaatctgaaatgggcacgtgcaataggccttctaaaaatagaacaggcctgtagtaatctgaaatgggcacgtgcaataggccttctaaaaatagaacaggcctgtagtaatctagaatgggcacgtgtgataggccttctaaaaaatagaacaggcctgtagtaatctgaaatggatgtgtgtaatagaccttctaaaaaatagaacaggcctgtactaatttgaaataggtatgtgtaataggccttctaaaaatagaacaggcctgttctattttaaaataggtatgtgaaagggcgaccttgaactgtcaggaactgaaatatattaaaaatccgaacgttaaaaagtgttttataactttcatacggaatatatggagtacatatggttcctatggtataatagactgtaataaaaaattggcgttttgtttgtaagacgcacccccagtacaggaatgtatggacattataaattggtgaatatactttcacaaatagatgcatacggaggaactatggaaaacaaggaatttgttattgttgtcgattttggcggtcaatataatcagttgattgcacgccgcgttcgtgaaaatcatgtatactgcgaagtatatccatacaacaaagcattagaaaaaattaaggagttgaagccgcaaggtatcatctttactggtggccctaacagtgtgtacgaagagaattcccctaaaattgaaaaggaaatctttgaacttggcattccagttcttggcatgtgctacggtatgcaatttatggcacatacattgggtggcgaagttaaatctgcggacaaccgcgaatttggtaaaacacctactaaagtggatactacatccccattgttcaaaggcttggacgaagaccaagttgtttggatgtcccacgttgactatgtagcaaaagtacctgaaggtttcgaaatcgttgctcatacaaaagattgccctgttgcatccatgcaaaacaaagagcgtaaattatacgctatgcaataccatgcagaagtattgcacactgaacatggtaaagaaatgcttcacaacttcttgtacgaagtatgtggtttcacaggtacatggacgatggcaaactacgcaaaaactgctattgaagaaatccgtaatactgtaggcgatggtaaagtattgttggcattgtctggtggtgtagatagctccgttgcagcagcgcttatctccaaagctgttggcgaccaattgacttgtatcttcgttgatcatggtttaatgcgtaaaaacgaaggcgacgaagttgaagcagctttcaaagattccggcatgcatttcatccgcgtcgatgcagaaaaacgtttcttagacaaattggctggtcttgaagatccagaagctaaacgaaaagctatcggcgaagaattcatccgcgtattcgaagacgaaggtcgtaaaatcggctccgttgacttcttggcgcaaggtacaatctaccctgacgttattgagtccggtactggtgaagcagaagttatcaaatctcatcacaacgtaggcggcttgcctgcagttgttgacttcaaaggacttatcgaaccattgcgcaacctcttcaaagacgaagtacgtgaacttggttctgaattaggcttggctgattacctcgtatggcgtcaaccattcccaggtcctggtcttgcaattcgtgtaatgggcgaaattacaaaagaaaaactcgacatcttgcgtgatgcggactacatcttccgtgacgaaattgcaaaagctggtcttgatcgcagcatcaaccaatactttgcagtactaacatctacacgtaccgtaggcgttatgggtgacttccgtacatacgattacacattggcattgcgtggcgtaacaacaacagacttcatgactgctgactgggcgcgtatcccttacgacgtattggacacaatctcccgtcgtatcgtaaacgaagtacaacacatcaaccgtatcgtgtacgacattacatctaaaccacctgctacaattgagtgggaataataagaaatattgatttataaattcattaactgtactttttgaataatactaaattcaactgaaaggtaaaagaataggtttgaaagggagttattgaattttaagtgcgcataaaagcctcccgtcaatttgctgggaggctttttgttgtgttgtcagtgataaattataatttctctgttttgtattataataataagaaaattgtaatatttattataattaaccgaaaagcaaaaaaaaggagaagattatgggaggaaaagacgcttcacgaggctttttgtatcaagcatttgcatccgttcttgaagcactatgtcaaaagaattgggataaaatttatattgaatttgattctgaaaaggataaggttgatattgcattagaaaaagaaaataaggttttcaaaagtattcaggtaaaatcaacaataaatacttttactaagaattctgtaagtaaatggatacaagatcttattaatgatgatgtgggttcaactgaatttgaattatttttaatagggcaatgcgatgatactgcaaatacatttattaattcaataatgaaatttcaaagcaataaactggataaaaaatcacaaagttcattgaaagggtttgatacaaaaatcataaaggggatgaaaatagattttaaaatgctcccttttgatgtgggaatattggaacaaatagttagagattcattgaataaatatatttcatctaaaaatcaaacagtaacttttgaccaaattagctttattgcatctgctactgtgaatgaccaaatgatttcttcaacacatggtaaggggattgatagaaagacatttgatgaaaatttggaaaaacgtatttttatgattgccgataagtattctcctaaaagaatatctattagtattaaaagctttaatcgtggagcagtagatatagaggatgaaacaatgtgcttatccttattggataaatttaataatcgtaagttaaaagatgaatataattggaataatgatatttatgaagtgatgaagaaatttttgcttacaaatacaaataacaatgatgcttatcaaatatatttagatacacatgtatctttagcttttgctgcggggagagttctcgatagcaaatctggtattaatgtaattccaatacaaaagtcagcaacaaatggcattgaattatgggatgtaaaactatcttctaaaagaaactattctaattgggatatttcatatgaaatatttgatgaaaatcaagccgattctgtattaatactaaatgttacccacaatatttacgatgatgtagttagatatattaaagaaaacaatctaccgattaggcgtatcataatttgtacacctgataaaggagaatttacaaacttttcgatagaagatggaaaccatgcagcaattcttgctaattctgtttataatgctattgtagaaagatctactgaagaacgacgagcaacactacatatttttgcttctacaccaaatgcatttatgttttttttaggacaaagctcacgaggattcggtaaatgcgtgttatatgaatatgattttgaacaacgtggttcttgttcatattcaaaatcaataagtttcataaattaaagggggattatttatgtctactgtaccgtcatattttaaagattttctatctaatattcgtttgtctacgaatcaagtgaatgacttgaaaagcggacatatgacattaagaagaagattagaagcagacaaaacattatcgaatattattgttagcacttttttacaggggagttatcgtcgttctacagcggtcaaaccaaaaaatggaaataaatcagatgttgatattattgttgtaacaaagttagactctgaagaatatacgccagaaaaagcattaaatatatttgtaccttttttagagaagcactacaaagataagtatagaattcaaggcaggtcaataggtataagtttaagttatgtcgacttggatattgtacctacctccgccccaagcgaaagtgaaataggaatattgcaagataaagctattatttctgaatatacaattgaagaatttcagcaaaatttgctagtaaaatcattagataattttttggttaaaagtgcctataatatattttgtaaatcggatagcgaacaggaatggaaatctgatccacttctaattcctgatcgtgaagcggaagaatgggataaaactcatccgcttgagcaaattcgatggacagttgagaaaaacaagagttgtaatacacactatataaatgttgttaaggcattaaaatggtggcgtaagatacagtgtccagatataaaacatccaaagagttatccatttgagcattttattggtgattgctgtccaaatggtattaccagcgtagcggaggggatagtgttaactcttgagaatattgctcttgaccatcctagtaaacctttcttggctgatagaggtgttcctgagcatgacgtttttgcaagaattacagaggatgaatactctaatttttatgatgcagtatgtggtgctgctaagattgctcgtgaagcttttgattgcgaggacttatatgatagtgtttgcaaatggagagagttatttggtactgaatttccccctgctccagaacctacaaaatctaattcttcaacaggtttttcaactcgcactgaaaagtcaatagctattccagaaggaagattcgcataaatggaaagaatacaaattcctgaaaaactaaaacaggctagaagagctttggattcgttatcacaggttaaaatattagatgattggaaatttgataatgaattaaaaatttggtttttgcatttaggcatatcaattaaatatgaaacatcttattttcctcaattgtgccagtggtatgttatagcagaagatgaatatccaaaagggaaaattaagttatatcctgatgtagaaaatagtattaacgtgaccttatatcatcaatctaataattcaaaattggaaaagaatggtttatggagaaaaggcgcattgtgtttggagagaaacacaatatccggctttcgggaagagccttatagtgtcgatgaacgattgctgtaccatgtaagtagggcaataatttggcttgagtcagcggcacaaaataaattagtattagataatgagctatttgaattgcctgattttagtttggcttatgtgtctgaaatacaatttgctttttctgaaaattgtgtcacttatatgcaatggcaaagtactaattctagatatggaatcgcagaattagatgtttataaaagtaagccatttgtgtattatgtaaagtgttttaaatcattaaatggtgatatagagcaccgtacacaatggggtaattttctttccaaaacaaatatatctactccaattaaagctccgtggatacttttgaaatatccaccagtaattaatgaatggcaagccccagaaactttgagtgagttaatagatgcatgtaataatcaagatatcgatattatgaatgtgttggaaaaggttgtaccaaagattagggatggaaaacatcatttacttctactgggatttccaattccgagagtttttggaggtgagactgaaagtattttttggatggctatgtatttaccagttgtatcatatggtgaaaagacagcaaaaggatttagaactaatcataaaggatggtggtttcgtgataaaagagaagttttaacacgaaagatgaaattggaatggcttatttcagaaaattggaatcaacaagaaatatcgcagagagggaagttgaacgaccttttagttagaaaaaaggtattgctccttggagcaggttgtgtcggtgcatcagtagcagaagtacttgtacgggcaggcgtatacgatctcactattgcagattctgataaatttgaaatcgggaatttgtctcgtcatgttcttaatataggtaatattggtgagtctaaagaacaatcattgagcaattatcttaattccttaaatccgcatgcaaatattgaagtaagaaaagatattcttacaattgatgaagagtataaaacaaatattgatttagataaatacgatataattattgattgcacaggagaaaataatgttcttgatatttttgaaaaagttatttttacaaaaagtcatattatagcctctgtatctgtaggtttgggcgcgaagcatttatatataacgttaatgagtggcaattcttttagttttgattcatttcataagttgatttcgccatatatacaaaaagaaagagaattaattgatgattacaatttaccaaggaatggaataggttgttggcatcctacatttcctggaagaagtgatgatatttggcttgcagcttctacagcagtaaaggtaatcgaaaattatattgttttaaaaccagagaagactctttcaattgtttatgaacaaaaagaaaaaaatgggatttttgaggggtatatattggtagaaaaaaaggaagatagataattaatgatctttaaagataagagtcaagcatataatgtatatttgggaaaagaaatatataaacaaatgattagttattgtcgtgaagccaatccttatgaaactggaggtgtgttaataggaaattactcacataatcaaatgatagcagatattttacagataacaccagcacctaagaactctcaacactcaaaatataattttcgtaggagttcaagcggattaaaaaagcttttagattcagtatggaatcaaggattatattatttaggggaatggcattatcatccgaatgcttcggctgaccccagtattactgatttaaaacaaatgtttaccctatctagaaacaatgatttaaaatgtcctgaaccgatattgataattattggcggagatgaaagtaattggcagatttcagctagtgtcttttttaataaaagctatgttcgtttagaattagtaaaatagtcagactttttttatctacttgatagaatcaaaatgcttatgattagaatagatatagttgaagatggtggttattctaaattttctaatatagttgacaaagaaaagtattatatagaaaaattggaaatgagttaattgtaaagggactgaggtcctatgaaaacgacaaaatcttttggcgagtatcccaaatactctctccatgatgcaagggtccaaaaaatagcatacgcagatgataatttaatttttacctttgattatattttttcctatgagaacggtgttgaacagactcataaggctaagattgtatttgagaaatgtgatgttgatgatctagaaattctcgtctttaatagtacaatcttagatactttcacaggtaaaagtattgagttacctcagtatcagcaggattatagtgaaagtgagttcgaggttattacagagacttataactggggtcgggctgtactccaaggttggttatggaccgaagggaatcctgtacattgtataatgaacatatactttacaggtgacatgttatatgtaattgatgagagcttgtaaaataaatctttcaacataaaccaatgggagaaaataattatgggttataaaaatgtatgtaccaactgcagaatatccttgtcagagggcacgaattacgagttatttaatacaaataaaacctgtcccatatgtaacggcaaaatgtactttgtgaatgagaagtttaaagctcctaaaaaatctaatgataaagagtggacgattatagagtatttgttgttgagtggctatgattttaggaatcccatttatggtgctgaaaggtatatgtatttcgagtttcctaagaacttacaggaggcggaggcattcgtgcgtgagatgagagagttatagtaaactatatgagcaaagagctttaatgatatgtaaacgagtaacaaaattttgcagagaggaggcaaaactatgtgtgaagtaacaataacacaagctacagcagaattgcctatgcttgtaaaaaaactacagacaggagaagagtctgttgtgtatatcaaacaagatggacggactgtagcgcagcttacactgtctgaagacactagacaagcagaatctaaagttgatgtgtcgaaacgtataggcattgcaaaaggtaaatttaaaatgccaaaagattttgataaatgggataaagatatagaagaaatgtttggagatacaagatgaatatacgaaaagccactactgatgatttagacattgttacaaatatagaatctacctgtttcccaccagccgaggcagcccctcgtgaagcgtttaaagagcgccttgctcattatgcagaccatttccttataatttttgatggcgatacacctatcggttttatcgatggttttgttacggatgatgaaatcctaaccgatgagatgtttgctgatgcatctatgcacaatcctgatggggcatggcagatgatatttggtctaaatacaatgccagcgtatcgcaatcgcggtgtaggggggcagttgattgaggctttcatagaattggccaaagaagaaaaacgtaaaggcgtaattttgacatgtaaggaagaaaagattcattattacgccaagtttggctttgtaaatgaaggcgagtctgtatctgatcacggcggtgctaagtggtatcagatgcgtgttgtgttctagccatataattaaatataaaagaagaagctgaaatcttgcagattggcattgatttcagcttcttttttgttgggaaacacattaagtttctacaattaaattaatttagactatacggatttgcctattattgtgtataccaaaatccatatggttatttaaataatttctttaacttgcgccacgcctttatcggtcagcatatagtacccatttgttacatacaataagccttgtttcttaaggtgtgatgcggattggtgtgtatagtctggcctccagttcaagtgttcgtgaatggtgccgataccattttcaatggccgccacaggtgtattcatatgggtatagatgtggcagagcatcattgtttctcgatagtgacgacgcaagtggcgttggcgacgataggttgcaatatagcctgtctttggtgtgcaaattacggcgattaataaggcgagacctatggtcgttgcgatagcgcctgcaattgatacgtctagggtgaaagcgacttcagtaccgataacagcacagataatgccgatgatgatactgctagtgagcatggctttcacagagtccgtccataaataagcgataaccgcaggtccaatcatgaggccgataacgaggatggcacccaccgcttggaatgaagccaccacggtgagggacaccatggtcatcagcatgtagtggatgagggcaggcatgaagccgaagagccctgctaatagtggatcgaaggtagatagctgcaattccttgtagaagagcataactaatacgaggttgatgaatgccaccccaagggaaatccatagcgacacggggcctaagtcggtaccgtttacaatccatctgtcgaacggggcgaacgcgatttcccctagaagtgccgtatctacgtcaaggtgtgcgttgccgctgtagagactgacgaggatgatggcaatggagaatagaagggggaagatgataccaatagacgcatcttcgttgacgaggcccgtgttatgaaccatctctgtaagccacactgttcctacaccgactacggttgcccctactaaaagtaagggcgagtttaagtcttccgttacaaagaaagcaagcacgatgccgaggaatacggtgtgcgtaatggcatcggccatcatggacatgcggcgtagcacgaggaatacaccagggatagcgcacgcgatggataccgcaatggcgatgagtaaaatctctgtatgtactgtcatggggcacctcttttccggaattgccacaagatgcctctattaggtgcaaatatgaggctcaacagtacaataaccgacagaatgacgatgatcgcaggacctgtaggcagtttttgtactgttgtactccaaatggttccgccaatagcagataccatgccgaaacatcctgctagtatacacatggtacctagcttgttcgtccactgacgggcccctacggctggtgcaataaggagcgaactgattaagatagcacctactgattgaatgccgatgatgatggtcatgatcaatagggaacgatataaaatgagggtaaaagtgacgggaatttgcaatgttttagcgtattctacatcaaaggaaatgagctttagctccttccaaaataaggctgttaaaacgataatgatgagcgctgctgccgatgtaatgtacacatcgcgagctaatatggtggcggcctgtccaaatataaattttgaaagccccgcctgacctgcattgttcagactttgaaggtaggtgagtagaaccataccaagaccaaagaatgcagatagtatagtagctagagcgccatcgaatttgattttactgttttctacggtgatggtaatgagccacgccgcagtgatagaggacagggctgcacctataatgagtacctcaatatcttttataccggtcagcaagaatgcgatgactacaccgggcagtgccgcgtgagagaggccatcaccgatgaggctttccttgcgcagtacagcgaaggttcctgcaataccactggcaaggcccaagagagccgtgccgagcaataccatctgtgttgtataggattggagtatggtcatacaatcctccccttgccgtaggtgcgctctatggcttcgtcggtaaaggtctctgctacgggaccataggcaatagtttgcttattgaccatcgttacccagtcgaaatattgaggcactgtatttaaatcgtggtgtacgacaatcaccgttttgccgcgcgctttcatttcttgtaaaagagagataatggcgtgctccgtcgttttatcgacgcccttgaagggctcgtccatgaggtaaatatctgcctcttgtacgagggctctcgcgaggaatacacgctgttgttgcccccctgaaagttgacgaatttgcctattcacatagtcgctcatgcccattttttcaatcatggagagggcgagttccttatcctttttacttggtcgtttgaaccaacctagatgaccatagcggcccataagtacgacatctaatacggtagtaggaaagtcccagtctacgctaccgctttgagggacataggcgattttcttgtaatcctttttgtccatcgcaaggtggtggtcgatataaaacttaacactacctgagataactgttaataggcctaacatggcctttaataatgtagatttaccggctccattagggccgacgatagccgctaaggaaccgatgggtaccttcatatctacgtcccataatactggttttgtcgtataggcaacggtcatatcttcaacttcaacggcccattccatagagacctccttttatcattgtttatttaagtgctttagcgatggtatcgatattggcttttaccatgccgatatatgtgccgccttcagtgccttcagaaccgagggagtcggagtataattcgccaccgatagcaacgttccagcctttagccttagctgcttcttgaacggcttcaattgttttgtgtggtacagaagattccacgaagatagctttaattttatgatctacgatgaattgcacaagttcatttacatcttgtgtgcctgcttctgtagcagtactaacgccttgtaaaccttttacttcaaagccgtatgctcgagcaaagtattggaaggcatcgtgtgctgttacgagaacgcgagattctttaggaattgattctgcttgtgctttaatgtatgcatctgtgtcatctaatttagtgaggtacgcatcatagcgttttttgaaatcctctttgtgagctggatctgcttttgaaagtccttcgtatacggccttggctgcaagtttccaattcgctacatcgaaccaaatatgagggtctttagttttcacgccatcttcttcgtcaaagtcgagtaaagtagctggatcaatagcgtcggatacacggatggtagctttattttgttttgttaaattgtcgaaaatggaacccatcttaccttctaagtgaacaccgttgtataccactacatctgctttagacatagcagttacatcgccggcgctagcttggtagaggtgaggatctacgccaggtcccataagaccttgtacagacacatggtcaccgccgatttctttcaccaaatccgttaacattgttgttgtggcaacgacgtttaatttcttttgactgtcctgtgctgcatccttaccacagcctgctaatgcgaacaacatcagtgctaatgatacgacgactaatacgattcgattaaatttcataataaacctccttttgtaggtactaagtttaaaatttttagttatcttgttaactacccttatttaagcggaaaaatagccgctactaacgtagcggctagtggcagttatacggttttctgctaaggtcacgatagtttagtggatgagagattgtagatggtttggcccaacgagggcaacgataccaagtaccatcatgaccttcatttgaatacgctttctacgtctcatgatgaacctcctttgtgtaatttttttgtcatatcaacttgatatgtaagtccgaacagttatcttgaaatcaatatatcataaatgagaaaaattatcaataaaaattatcaataaaaattattctatacatatattttttactaatagactacatttggcagttgggtatttttttcttcatctttatcgagtattatatatgtatatttattatattaatttcgagggggaacaaaccatgaatatattaactcgattcgcgtgtgctgctgttcttacatttgcagtaggtgctatgatgcctgctcatgctgatgcggctgcgggtagatttacagaagcacctcgcgaggtatccatcgttaaacctacgatgccagctattccaaatggaattatcgtagcagatcatatgcgtgtacgattcctaattaacaaacaaggcaaggttgaaaatgtctttgtagaacaatcctctggttatggtcctgttgatgaggctgtgaaagctgctattagacaatgggaatttactccggctattggcacagatcaaaaagcccatgcatccatcataggcatgacaattacattgccaaagggtaatgctccagctaagtccggcaatggtaaattgacggtagacaaatcacagtctaacgataatcatgcgtctgatgtgaatgcgaaagcgaatggtcctaaggcaaaataaggagtgaaacagtctaggactcaataatgagagtagtcataagactaaatgaggagaaagatgatgagtaatgtattgcgttgtgttgccttaacggcattaattatgtccatgtctgccgctgtttctttggcggccacaccttatgaagcgccaaaagcaatatctacaccaggctttgattctggtgtactacatggttatgccggtgatacaactgttgttaatgtaaactttactattaatacagatggatccgtttctcatgtagaattacaaggatccactggtagtagtgatgcggatgcatccattgtgaatacgatttctacatggaaatttacaccggctacggatagcaatggcaatcctgtagaggcatctaaaactgaatatattaatttaaggaattaacagaatgcactcatacattgtatgggtgcctttttatgtgctggtgaaagtacttaaggatttaattatattgggtgaaagtattttgtggctcaattatcttgggaaatgtatctatagcaactgaaaattactttcaaaataaatataataaaagtacatttaatatagtaataatatattgtatatactaatagtctttgacccctggaggtataagcatatgaatccattacagcaaaagctagatattaataacgaacggtacagaattattgtatctattaaagaggattatttagacggtaaattatccttggaagagggtaaccgtattttaaaagaaaagttaggcacttgtacgcctgacgaatttgcttatgcagagcaaagtttgaaaggtgtctataaggatgaagaaatactagacaagatggatgatttgttgaatttatttgacggtgtattagtgcgtgccgaaaatgagtacccagagaatcatccattgtgggcttatttagaagaaattaatgcggttgaaaaggtagctcttgaagcggatgaattgttaaaacaagataagtttattaaaaatccttggcttggtgtttttgattccttagcagaatggcgtatccatctatctcgtaagcaaaatcaattatatccaatgttagaaaatcatgggtttgatcgtccaacgcggattatgtggacctttgatgatggcgtgcgcgattctatctcttcatcctacgcattgcttcgtgaagataaatatgaggagtttttagcatctgttccagaaacactggcaaagttacgtgatttgaactctaaggagttagaggttttattgccaacatcctttaaattattaagcgatgaagaatttgtacgtatgagcaaaaatgaccatgaaattggttatgctattattagcgcaccaggtttatatgttgtgccaggtattaacgattccgcagcctcattaaatggaaatgctgctagtcaaaatagtgcagtatctaatgagtttctaaatgatttggcaggtctattatccaaatatgttggccctgtaggaggtgcagccgttagtaaggatgctgtcctagatgtggccactggcaaattgaccttagaacaaattaatttgttgttccgccatctacctgtggatttatcctatgtagatgaaaatgaactcgttaagttctacagcgatacgccacatcgtatattccctcgtagtgctaatgttattggccgagaggtgaagaattgccatcctgcgaagtctgttcatgtagtagaagaaatcgtagagaaattccgttcgggagaacaaagccaagcagaattttggatcaataaaccgggcttgtttatctatgttatctacacggccgtgcgcgatgaaaatggtaaattccgaggcgtactagaaatgatgcaagattgtacacatatccgtgaattagaaggctcccgtacattgttgacttgggataaaactgactttgtaggggataatcaacgcatttattaataaaaataaaaagtaactcttctaggtaaataaataagaggcgaggtcgcgtgaccttgcctcattttattactacaaaatgtgttgcactaatttaaaataaacatacaacaatttacttttattcatctctttcgtgtatacaaatttattaaaaacaggtaaaatagagattattagaagtattttcaatacacgtactgatagatttttataaagttatacgataaaggtgaggattagaatggcaacacgtcgcatttggaatcaaagtgaaatcaagacaaatccgttattttctaaattacgcagcaccattgaaactgcgttttatggcaataacgtaaaacctgttacatctgtagcagaagcgtatacattggcaacgcaagaaccaggtgtcattcttcttgatatgcctgtatttaaaccagaagaacaaggtttaccagctgacgctaaaattctcgtaactaatgatggtaaaacgactggccgctatgcgaaggctcgccgtatcattggtgatgaaggtattgatgaagtcgaattagccggtatcgctcgtgatgctgtgtatgatagtcgcaataaagaatggatttctacacaagctgtggttggtcttgatcaaaaattcacggctcgtgctcatcttatgattccaaaggatcatgcatctatcatgtattcttggattatgaactttaaattctttgacgatgcagtgaaagagttctataacaacagtaaggacatcccggaaggggatatttatatctactctgaccctgactatgtagtaccgggtcatccaggtggtcttgctatttttgaccctgctcataactgcgctatgattcttggcatgcgttactttggggaacataaaaaaggcacattaacattggcttggtccttggcaaaccgttatggctacgtagcctgccacggcggtatgaaacgctataaccttaaaaatggtgagtctttcacaatcggcgtatttggtctatccggttccggtaaatctacattgactcacgaaaaacacaatggtcgctataatatttctatcttgcatgacgatgcatatatcatcaatacaaatgatttgtcctccgttgcgatggaaccaacatactttgataaaatgcaggactatcctgtggaacaccctgctaataaatatttattaacattgcaaaacgtaggcgttaccctcgatgaaaatggtaataaggtcgtattggctgaggacgtgcgcaacaataatggccgtgctattaaatcccaattctggacagacaatcgcgtaaaccacgtggacgaaccggttaatgccattgtgtggctaatgaaagataaaacattgccaccaatccttaaaatcgacgaccctgtgttggcttccactatgggcgcaacccttgcaacacgccgctctactgcggaaaaactcgatgccaacgtcgatccaaatgcactcgttattgagccatatgcaaacccattccgtacctatccgctagttcgtgattatgaaagctacaaaaaactcttcaaagaatgtggcgtagattgctatatcatgaacaccggattcttccttgaaaagaaaatccctaaagaagtgacccttgatttattagaacgcctagtagaaggagacctacaattcgaaccattcggtgcctatgaaaacctatcctacgtagaagtgccaggattcgaacccccatttgatgtacgtgaataccatcaccaactacaccaagcctttgaattccgctctgaatacgtggaaaaactcaaagacggtaaaaatgaattaccacacgaagtacttgatgtactaaaaactttaatgtaacactttacaataatcaaaatagcccctctggaaaaaacacgctactgcgctaaagcggagcccgaagttttttccagaggggctatttcttttctgtatctgtttacattaaggtttttagtgcatcggtgtagggggaagctactgcgctacgcggagcccgaagtcgtttgaggaggattttttcatccttacttattcagtaagtacattaaagtttttatcatatctgcgttaagagaggcacgctactgctctaaaacggagctaatgtttaaaatattttagatggagcagtaaaattttgtgaaaatgatgcaggagaattattgatgtatatcgaagtagtattatgaggcatttatttctcgtgagtgcttttaattcctataataaacaggaattaaaaatcagtttgttttatgaagttattatgagttttgtaattgaaaaacattgttataatggggataggagcggatatttttttataatatgtataaaatttaattgacaattgtcctctcaacaaatatacttatgatagtttaaaacatatttatgagataggatttaaaacccacaattaaggtggatttaagttagatagaagaagaatatgttttcttgttattagcggttggcctacgtaggcccctaggaggtttaaaatgagtaaagacgtggaaaataaaaatacccatgaccatagctatggtgaacatcatcattgccattgcggcggtcatcatcaccatcatgaccatgaccacaatcatgatcacgaccatgaccatgaacatcatcacgaccacgaccatggtcacgatcatagccatgaaaaggctttgcctacagataaatgggtgccacacactcatgaaccaggcgttcctcatgaacatggcgtaaatgattatcttaaggctgttgctgagtatcgtaaaacatggcctactaagcaagatgttatcgagcaaactcctgaccctgccgtgcgtgagatgattcttcgtatggaacaaatcggttgcgacactgtattcgaccgtttcgataaacaacaacctcaatgtgcgttcggtattgctggcgtatgttgtcgtatttgtttcatgggtccatgtaaaattacgcctaagagccctcgtggcgtctgcggtgccgatgctgatcttatcgtagctcgtaacatgacacgtgctgctgctggtggtttgactcaacatggtgcgcatgctcgtgaaattttgatttctttgaaagctgccgctaatgatcaattggatattccaattttgggcgaagaaaaaatccgtactgtatgtaaggctttcaacatccctgaagaaggtcgttctttgaaagaagtagctaatgatttagcagacgttctattagaagatttaagtcgtgcattgcctggcgaatataaaacaattacagcaatggctcctgctgaacgtcgcgaagtttggaaaaacttggatattttgcctatttccgcgtacaatgaagcatttgatgcataccatcgtacatgcgtaggtacagatggcgattgggaaagcaatatgaaacaattcttgcgttgtggtcttgctttcacattcactggcgtagtagcggcagatattgctacagatgccttgttcggacaaggcggtcgtcgtacatctaaagttaacattggtgccttgaaaaaaggttatgtaaatatcgctgttcatggtcacttgccaacattagtatcccaaatttgtacaattggtgcctctgaagagtacttagaaaaagcgaaagctatcggtgctaaaggtatccaattctacggtatttgttgctctggtttgtccagtatgtaccgttatgaaaatgttattccattgtgtaatgctatcggtgctgagcttgtacttggtacaggtgctcttgactgctgggtagccgacgttcaagacgtttaccctgctattatggacgtagcacgttgcttcaacacaaaggttatcactacatctgatgcagctcgtttaccaggtgcagaacacattggttacgatcaccatcatactaacttgtctgaaacaaaagcattggctcgcaaaatcttggatcgcgctcttgaagctcatgaattgcgtaaagggatgcctgtatttattccaccatatgaaatcactgcagaagttggtttctctccagaatccactgttaaacattatggttccttcaaaccattggcagaggctttaaaatctggtaaagttcgtggtatcgtaaacgtagtaggttgttccaatcctcgcgttatctacgaaaaagcaactgtagatatcgttgatacacttatcaaaaatggctgtatcatcttaacaaatggttgtgcgtccttcccattaatgaaacttggttactgtaatacagatgctattaagaaatgtagccctgcattgcaagagttcttgggcgatgatcaaccaccagtatggcatgttggcgaatgtgtagataatgcacgttcttccggtattttcgctggtattgctggtgaattaggtcttaacttaccacaattaccatttgctatgtctagccctgaatggtctaacgaaaaaggtatcgatgcatcccttggtttccgcttgatgggtatcaactcctaccactgcgttgagccacctacacaaggctctgatgctgttacaaaatggttgaaagaagacactaaagacatcttaggctctgttatgtatgtaaatacagatccagctaaagttgctgaaaaaatcttggcagatatcgatgaaaaacgtgctgctttaggttgggcagaagtaaaataatataatataaacaaaagaccctctccataatcctccaccgcccagatctgttcctttggaacaggggcaaagtcggattctgaagagggtcttttttgtatagggagaaaagacagagcaaagtcggacgtattgagagggttatttcattagaggtaaactctaaattagtaaatctaaatgatgagttttattttctacgttttagcctaattaataaatatgtgtgaaagtagaaaaaagagatagcagacaatttgtccgctatctcttttaatcaaaagttcatcaacttaatctattacgtcatttataactctgttatactaataacaggagtcattgacgtgagttaggttcatcaccgaaaggtggtgatactatgagtaaattcgagaaggtttatataattctttttgtaatttccatagttgtatctatcttaagtttattcaaataaacttaagaaacgcctaacgtaataagtactggtaatgcttacacgttaggcgcatctcgttttactaatttttagatgagcctaacgcttgcacacgtcaatgactctctttatgtttatagtatacctcaataacaacataaaaacaacataggtatatagtaacttatagtacaatagtttctccatcctcaggaactgctacatggctttcgatattggtgcctttgataaatttgtgcacatccttacggcttgttgctgtatgattaactgtatccatatgaacagcgatgattttagcttctggtttgcgtactaccatacggccaatatcttttgtccccataataatactatcttcaaagcccaaaacttgagcatatcctgtattcataataataacattagggtcgaagcgaagaagggccttctctacatcgcttgtccatactgtatcgcctacaaggtacacagttggttcgccttctgcttcaaaaataacgcccattgcatcgcctgctaatggtgcgagaactggatttgcatacatttctacagtgccgtgtgagccacctgtttttctcaatgtgataccattaaactcaagactttcaaaaatgatgcgtacatcattaaagccttgggagataataagttctttgtccgctgtattttgcacaaaaataggaagtgactttggaatagatttaattgccgtgtcatcccaatgatcgagatgtgtgtgtgtaactactactgcagttacattgcttaatagattgtccattgatacaggcaaatcaaccataggcattctttgttgatagttaaatgttccttcaaagccaggataagtatcttttggtgctaagaatggatcaataagaaatgttgtgttttttattgttaattttcctgtagcatttctaatgtgagtatattgtgtcataggtatctccttaattgtattttgaaaatctaatcaaatagattactgtttgtaatccctagaattagtgtaccttgttttgttatactagtctcaacaataattgacactatgtttgttaatagacacattgtataaatgtgtctatgtaggaggttatatgataactcgtaaagaaatgacacgaatgttgttaaaagaagggttgcttagttgtttagaaaatcattcttttgagtctttaaccgtaacattattgtgtaaagcatcaggtataactcgttctactttttatttacactatagcaatatcatggaaattgttgatgatttagtagatgatgcaattgcttattcaaagccaggaatggtagataacaacaatttacaaactatagctcaaaccttatcggctgcttctgattcagtgtcattgagagaagcatacgattctatttttgatagattgcccttatgtcagcgtattatacgacataaaaagtatttacctctatttttagatgaacaaatttcagaatatgtattacaacgcattataggatgtgaaaaagatcgacaagggctcgttgtggcaaaagcccttggggtttcatttgatgtaggggtatccgtttttgtttttttagtacacggtctatatgctgttaataaacaatataaatggtctcagagcgatgagtggttagaagctcagaaaactatttttgaactcgtttatcgtggattacatagaaaataagcatataaggctcacatacttctttggtgcatcaatacatgctctcctagaaattagaacaggcctgtactaatttctagaagaggtatatggatgaggtcaaggccctaggccgcagaccgttgtgtttgtttcgaacgcataaattcatggacaaccataattgctgtaatagaaaatataatttactatgtgatgttctaatacagatctaaattccaataaaagaacacccacaattatccgactttactaggtcaaggccctaggccgcagaccgttgtgtttgtttagaacgcataaattcatggacaaccgtaattgctgtggcagaaaatataatttactatatgatgctctaatacagatctaaattccaataaaagaacacccacaattatccgactttgctaggtcaaggccctaggccgcagaccgttctgtctatttagaacgcataaattcatgggcgaccgtaattgctgtaatagaaaatataattcaccatgtgatgctctaatacagatctaaatttcaataaaagaacacccacaattatccgactttactaggtcaaggccctaggccgcagaccgttaaagtagctggaggataattgtgggtgtcttttattaccaagtttagatagtaaattatattttctattccgcagttataaggtagaacatgaatttatacgttcatgtttgccccttttctcacatagaaccagaagcaaaccgcaactgttacgatgttgaatgctagtagtactgcgaatgcagggtgaatgttgccgaatgtggagtatacgaaaccgaagattttaggtgtaatgaatgcaccgtatgcagctacagcagctacgaaacctgtgattaaagaggataacaacggattgccaaatacgtgaggaatcatacggaatgtagcaccagttgcgaagccacagcatacgaatgtcaacacggacatagcaaagaagaatgggaagttgtgcatatctacgccaactgcaattagagctgttgtagcacatagtccgagaaggcttacaaaggtaacttttgtaccgctgttaattttgtctgctaaccaaccacctacagggcgaagtgcacctgatacaagtggacctacgaatgcgatagaagcaaatggtacttctgggaattctttacctactaatagaccaagtgctgccgcataaccagagaaagcaccgaaggaacatgtatataacaatgtaagtgcccaagtgtgtttgttaccaaagatttgtacaagatttttaggatttggtttttctagtggtaagttatccatgaaacgtgtcataagtgcaaggataacaacaagtggtacaatccacatgaaagccgcattggcaaggtatactgcattacctttgatgatagctggtgttacaccaaatacgctacctaatgcagcggaacccatagcgaatggagctaagaagtagattacggagataccaaggttaccaacgccgccgttgataccaagagctgtacctttttcggatttagggaagaagttgccaatgtacgccatggaggacgagaagttgccgcccgctaaaccgataagggcagttaaaatcataaatgtcatataagaagttgttgtatcttgaacggcaaagccaagccatacaacaggaactaataaaataagtgtggaaataaatgtccagttcttaccaccgattaaggctggcatgtaggtatatacaaaacgtaatgtagcacctacaagacctggtaatgcggctaatgtaaataattgatctgttgtaaagttaaagccagcgccatttagttgtgctgcaatggttgcccataaataccatacacagaatgaaagggttaatgcaattgtggatataaccaagttttgtttagcgatttttttaccaaacttttcccaaaattctggattttctggttgccaattagccacaatttcgctacggcttgcccctacttgaggcatttttagttctgacatgagagctctcctttaactaaaacacatgtgataaagggtagatcttttcacacgaatatgtggcacatctcgtttaaaagccttgtaaaatatggtactataataatagagagtgtgcctaaaatcacaccattattatataggacagaatataatgtgaatgtgacgaaaaacacacttatatgagaattaatcggttataatagggataatatacgtaaagtatatagtatatgtgccttttgtgtatggctgattgtgaaagctactttcacaatcaatatggacaaatgacactgaaagatgcacggtgatagtatggaacaggagttaattaaccagttacttgcattgccaggagaaacaattcaccttgaaaaaggcgagtttttgtttcacgaaggtgatatagcagatcatttttttattgtccgcgaagggcgacttagtatcaagaaatttgaggcaagtggtcatatttttgctcatcggttggtggggccaaataatgtgcttggtgaaattcctttgtacgagacgaacacccggacttacgtgttcaatgcgattgcacgtgaaaaatgctcggtatattccatccgttatgatgttttggaaccagccattgcaaaggaccattcactggccattgcaatgatgaaaatctatacacttcatatgcggcgacaacaagccaaatacagagatttgttgttgtatggcaaaaaaggtgcattctattcgacactattgcgtttagctaatagctatggtattcaacgtgatgatggtatctatatcgacatcgcgttaacaaatcaagagttagctgaatttgctgccacatctcgggaaagtttaaaccgcatgctcagtgagttacgaaaattaggctatgtagcctatgataaacaccatctggtaatctgtgacttagatgcattaatcggattactcgatttagatagcgacacgatcgaccctaatatcagtaatatcgaataattgtggatattcgcccttgttgttggcattgctaacgcaagggcttttttgtagttttaaggaggacacgagatgagtttattgtctcagaaattcaagtttcttcgcaagaaggacgtatctccaagcggtcaccaaatcacagaagaaggcggtcgcgaatgggaaaatttttatcgtgaccgttggtcctacgataaagtagtccgcacaacacatggcgtaaactgtactggttcttgtagctggaacatttacgttaaaaatggtgtcgtagcatgggaaaaccaagctacagattatccggaaacaccggatgatatgccggactatgaaccacgtgggtgccctcgtggtgcgacattctcttggtatttatacagcccattgcgcgtaaaatatccatatgtacgcggcgaattggctgagctttggagagaagctaagaaaacagctaaaaatcctatcgaagcatggaaatctatcgtagaagaccctgaaaaggcgaaaaaatataaatctgcccgtggtatgggtggctttgtgcgctccacttgggacgaagcgacagaaatcactgcagcatctttactatatacagcaaaaacatacggccctgaccgcaacgcaggcttctctgtaattccagcgatgtccatgttgtcctatgcagcaggtgctcgtttccttaacttaatgggtggttcaccattgtccttctatgactggtatgccgatttaccaccatccagtccacaagtttggggtgaacaaacggatacacctgaatctggtgactggtacaatgctggctacatcatgacttggggttccaacgtaccgttgactcgtacgcctgatgctcacttcttgacagaggtccgttacaaaggtactaaggttgtatccgtatctcctgactatgcggaatctacaacttcttctgatgcttggcttaatgtgaaagccggcactgatgcggctcttgctatggcaatgggtcatgttatcttaaaagaatattacatcgataaggaaactccatacttcaaagagtatgctaaagagtttaccgatatgccattccttgtacgcgttgaagacatcaacggtgcagtacaaccaggtcgtttcttaaacgctaaggatttaggtagcaaagaagacggtgctgatttccaaactgtattaattgatgaaacaacaaatgaaatcgttgttccaaatggtacaatgggcgaccgtcacacaaatccacaaaaatggaacttacgccttgaaaaccgcaatacaggggctaaaattgaccctcgcttatccgtgtttgaccaacgccaagatgtgactgttgttaagttgccgtactttggtgatgaagagcacgaaggcgttattgaacgtgctattccaactattacagtacaaactgtagacggtcctgtaaaagtaactaccgtatatgaccttattcttgctaactatggtattgaccgtggtatcggtggtgaagtagcaacatcttatactgatgacactccttacacacctacatggcaagaaaaaatcactggcgtaaaagcggatattgctattgccacagctcgtgaatttgcagataatgcagaaaaaactaaaggtcgttccatgattatcatgggtggtggtatcaaccactggtaccatgcggatatcatttaccgtacaatcttgaacctcatcatgttctgtggtacagaaggtgttaacggtggtggctgggctcactacgtaggtcaagaaaaacttcgtcctgttgaaggttggggcggtatcatgacagctaacgactggagtaaagcgcctcgtttgcaaaatggtacatcttggttctactttgctacagaacaataccgttctgattgcatcgatttggcagaccgcgtatctaaattagctaagcctcgttaccgtcaccctggtgattacaacgtattggctgcacgtttaggctggttgccatcgtaccctactttcaataaaggcagtcaagaattgattaacgacgctcgtgcagcgggtgctggtacagaagcagaaatcaaccaatatgtggcgcaagcgttgaaaaacaaagaattacaattctgcgtagaagatccagcggctaaagaaaaccatccacgcaacttgtttgtatggcgtgcgaaccttatcggttcttcctctaaaggccacgaatatttcttgaaacatttacttggtacaaaacatggtgttctcgaagatgatgacgcaccagtaaaaccagaagaaatcaaatggcgcgaagcagatgaagctggtaagcttgacctcttaatcgacatcgacttccgtatggcttctacaggcttgtattctgatatcgtgttcccagcggctacatggtatgaaaaagaagacttgtcttctacagatatgcatccatatgtacacgtattccaagcggctgttgattgcgcatgggaaactaaatctgactgggatacattccgtacccttgctgaaacagtatctcgcgtagcgaaagagtctggcttcacagaatacgaagatatcgtagcattacctcttggtcatgatagcccaggtgaagtggctcaaccagaaggtaaggttctcgactggagtaaaggcgaatgtgaaccaattccaggcaaaacaatgccgaacctcgttcatgtaaaacgcgactacagtaaaatctttgaaaaatacattgcattgggacctaacatcgaaaacaaaatgggtgctcatggcatggcttgggatgtatctgatgaatataagacattatatgatcaaaatggtgtcatcgataatccagaattcatttctcatggccgccctagcatttacgaatgtaaggaagcttgtaatgctgtattgacattgtcctcttgtacaaacggtaaattggctgttcgctcttggaaagcaatggaagaaaaaacaggtctttctggtcttgaaaagaatgcaaaaggccgtgaacaagaaaaaattactttcgatgacatggttcgccaaccacgcttcattattagctctgtaacaagtactggtaagaacgataaaaaccgtcgttactctccatttacaacatctacagaagataaggtaccattccgtaccgtaacaggtcgtcaatccttctattgcgaccatgaaatgatgcgtgattacggtgaagctatggcgttgtacaaacctgtattgtcctataaaccagtacaaggtgactacaaacaagaaggtatccctgaaatcacattgaaatacttaacaccacatcataagtggtctacacatagtatgtatttcgatagccaacaaatgttgacattgttccgtggtggtcaaacaatttggctcaacgaagacgatgcagcagaaattgacgttaaagataatgattgggtagaagctttcaataaaaacggtatcgttgcagctcgtgctgtagtttccccacgtattcctcgcggtatttcctatatgcaccattcccaagaccgtcacattaacgttcccggtgcgaaggttaagaaacaacgtggtggtacgcataatgcaccaactcatattcacatgaaaccgacacacatgatcggcggttatggccaattgagctatggctttaactactatggcccaactggtaaccaacgtgatatgacaattgtggctcgtaaaatgaaggaggtagattggcttgaagattaaggctcaagtatctatggtcctaaatttggataagtgtttgggttgtcatacatgctctatcacttgtaaaaatacatggacgaaccgcgaaggcgcggaatatatgtacttcaataacgtggaaactcgcccaggcgtaggttatccacgtcattgggaagaccaagaaaaatggaaaggcggctggacattagataactctggcaaattagctctttctacaggttctaaaacaaaccgtttgatgaaattattcttccatcctgaacaaccagaattgaaagattattttgaaccttggacatatgactatgaaacattgattcatggtggtcgtaaaaacaaccaaccagttgctcgtcctcgttcccttgtgactaaacaaaaaatggaagttacttggggccctaactgggatgacgatttggctggtggtcaacatgctcgctctgatgtgaacttaactaagatgggccaagatatcgtatttgactacgaagaagtattcatgcgttatttgcctcgtctttgtaaccactgcttgaaccctgcatgtgtagctgcatgtccatccggcgcgatttataaacgcgacgaagatggtgtggttctcgtatctcaagatgtatgccgcggttggagacattgcgttccatcttgtccatacaaaaaaatcttctataactgggaaactaataaagccgaaaaatgcgtattctgttacccacgcttggaaaatggtttgcctcaaatctgtgctgaaacttgtgtaggccgtatgcgctatgttggcgttgtattctacgatatggacaaagtagaagctatggcagctacaaaaaatgaacaagatatttacgaaaatacattagatttgattttggatcctcatgatccagaggttatcaaagcggctcgtgcagaaggcatctctgaagcatggattaaagcagctcaaaaatctcctgtatacaaacttgttaaagaatggggcgtggcattgccattgcatcctgagtatcgcacattgccaatggtttggtatgtaccaccactcagcccaatcttgcaacgtgtaacatctgatgtatacttgccagatgcgcatgaaatgcgcgtacctgtacaataccttgctaacttgtttacagcaggtaatacagaaattttagctcgtacattgcaacgtgttctcgacatgcgtgaatacatgcgtcgtcgtgaaacaggtgacggtcctatcgatcacaatgtggagttaacagaggatcaaatgtacggtatgtacaaattgttggcattgtccaaatacaatgatcgctttgttattccatctgatgtgaaagtatctcgcgaaggtcgcctagaaatgcaacaaaatcgcggttttgcttgccctacagggggatgtcaataatgaaggatgctcagaaaatcgctcttattgcgtcatttcttctacgctatcctgatgaacaatggtataacgaattacctgaatggagagaggacgcccaatccgttgggcatcctcaacttcgccaaggtttattagaattcttcgactatgtagaggaatccgataaaaaagaattcgaagaccaatttgttcgtacctttgattttagtcaaaatacaacgatgtatttgtcgacttatgaattgcaaggtactggggaacaagcagaagaactcgttaaatttaaagcgttcttcctagaaaacgactatgatttgccaaaagaaatgccagactatattccagcacttcttgaattatgtgccgttatcgatgatgaaaaagcaaaagaaatttacgactattgtaagccaaaattggaatacattagagaacgcttcattgaggctaaattgccttatgcattcttgtttgatattatcttgtctgttgcaaatggattggaggacggtgcacgatgaatctattcctttggggcgctttgccttacatcgctttcaccttcttaatcgtaggtactttggttcgtttcttttactttgaaagaaattggactacaaaatcgagtgaatttttagagaaaaaacaattgcgcattgctaatccactattccactttggcttgctatgcgttatcggtggtcacgtagtaggtgtgttaatccctaaaacttggaccgctgcaatcggtattaatgaccatatgtaccatcaaggtgcgttatacatgggtgctgtagcgggtattatcttcatcgtaggcttcttgcttttgatgaaacgtcgctttactgtgcctgctatgaaagttaacacatctggtcttgataaatggttatacttgttcttaacattagctatttttagcggtatggctggtacattgcttaatgcatctggtttctttgattaccgcgtatccatcggcccttggttccgtagcctaatctcctttatgccggatccatccttgatggaaggcgtaccattcatgtttaaattccacatgttagcgtggatggtggtagctattatcttcccattcagccgtttggtacactgcttgagtgttccactcaactacttagcacgtccgttcatcgtatatcgcaaacgtgatcgtgtataattgaatacttgatagttcgtatcggttatgtccgatatactattacttagaatggccctcatggttgtgaaagtttgcgcttttatgactatgagggcctttattattgctgtgattttatctgttattttagatttttttatataagattctagtattctgactatatgagtaatattcatgtttttatgtgagattggtatacattttcactttactatgagaatgaaaattggtattatcttatgtggaattatttaacatcatatatatttaactgtgaggagtctcgataatggcagaagtagtgaagaaacaatttaagagtaagtaccatattcttatttggattgctgtgttagcactcatcttaatgggaatggtagaatatgggtatgtgactggcggcagaccatttggtaactggaaggttcatttaggtttaattccctatgctgcatggctcgtattaacctacattgcaacgaagccaaaatggtttatcaaacgatataatcctaaagaaatgtttgaagtgcatcgtatagtaggtattgtcagcgttgtcttagtctgtgctcactggtatgtatacttcttaaaggccctaaaatctttcttaggtttttggggcggttatatctcccttggagccatgtttattgctcttatttttggtgtactatacttaacaccttggattggaaatatggcaaaatccgtatctcgtaagaaagcgatttggattcatcgtttaaatcttattgccatcattgcagcaaacattcatgttcatggttttggtcgtttgtccaaaatggtaccattcttacctgtatttgatgtattaacatatgcattggttatttattacatctattggatgatcaaacaaaagcaatactaagaatgtagtatatattttttataaatagaagctctcgtctattactaagagatgagagcttttttcgtacctatctttacttattagtgcataagagatggtctttttttcttgtttacgatacaatatataggtaagttatcttaatatatttaggtaaatatattctaaatgatgtatattatttaattgcttgaaggttgtatggatatttcatggaagcgcatcatctatttgatttgcgctatacaagtcggtgcgggtattactattatcggcgtattatcatttatacctttatatttggtagatctagggctcaccaatcaaggtgaggctgctatgtgggccggtcttgtatctggtgtaacaccttgtatggtagccttgagtgctcccttttggtccaggaaagccaatgaactaggtcctcggcgggtgatgatgttcatccttgccactctgatgctagctgtaggggctgccgggtttgcacaaacgccgagtcagctattagtgttgcgtaccttacaaggcttagtgggtggttttgtacccattggacttggtatcattgtattaatcacaccagaggaacgcgtaccatgggcgatgggattgtaccaagcatcgatggtgatggggcttgtttttggccctcttatgggtggccttgctgccgatttattaggctatcgggctccgttctttatgttttctatcttatcaggcttgtgcttgttaggtgtgtacctactcatgcctaatctacagcatacgcataaggtagatagtaatgagtcccaatggtcattaattaaatcatttcttgctatcccacgtgtacgattgctcgtagttatgcaatttttatgtaattttggtattaccggtataggtcctatattgccactctacattaaacactatatgcaagtaaatgatgattttgtggctaccattgtaggtgttattatctttggggccggtctgtttagtgcactagcatcgatttcaatcggtcgcattactaaatggatgtctatgccgaatatattattgacggccacctgtggtgtaggcggattttttatcctccaatatcttatgccaaatgtgtggggcttaggtatatttagaaccattgcaggattctttatgggttttattacgcctatagcgaatactttgatttcaaaggctgttcccaaagagcggcgaagtattgtctttggtgctgtatctagtgtagccatgatgggcaatgtgttgggccctatgattagtggtatgatcgctaattggtttggttacggcatggtattttggagtactgctagtatcttttttatagccgctatatttgtgtggcgtagcctgttgcatgagagtatctagatgtctggatagtgacaggtttattgtttgagattatgtgtattgagagagttcatcatgttattaaaacaattggagtattttatttctgttgtagagcataacagctttacacaggcagcctatgagcactatgtgtctcagtcggctatttcacaacaaattaaatccttggaggctagtcttggcgttccattgatgatacgtgaaaagcgtagctttcatctaacaccggctggtgaatatttatatcggaatggtaaacagctgatgacgcgcgtcaaaaatttacaagatgagacggtgcgtgtcggtaaaaatgagcgtaagtatttgcgtattggctatttaaatcgctatagtggcattgcattgcaacaggcattaatgcgcactacaaaacggtatcgtgacctcgatgtgcgtatgtatagtggcagccattctgaattgaatcaaatgctcgatgataatttggtggatattatttttaatgattattggcaaattaagtcggataatgattatgtaacatatcttattagtaaggccaccgttatagcagaggtgcccaaggggtatactccggaggggtctgtagagctgaaagaattattagatttgccgttaattcttgtatgtcatgatgaccaacggttagatgaagaggaaaactatcgaaaatcgatgggatttatgggttcgttcctacaagttaaaaatcttgaagaagcccgttttctcgttggtgctggacaaggtatattattggtagaccgattcaagtatttagtggataccattccaggtattgagcgaaaatgtatattaaataatggtaaacctatagaaaaggattactatttctatgtgagttcacaaaatcctaatacctatgcagaggcatttaaagatattttcctacaggtcctcgatgaattttaaataacaacatatatgaataaaacaggtatcgcctaaaacctcacagctttatggtgtagtgatttcaggtgatacctgttttgtgtttatatggacagcatcattagaatgccatcatagacgagctttatgccatatatgattaatacggtaccgcatacgcgattgatccatacgagatgggatatcttaattttcttagctagtacatacatggttccagcaaggaatccaaaccaaatcggtgtcatcgcgaggaatccaaagaagaagtgatatatgttttcagcaggaatattagcgcgaaaggcgccgagcatcatggatgcatcgatgactgcttgcggattgccccatgtaacgagaagtgccattaacagaatatttttgatggggatgttcgtatcaacctttttaagtgaaggtgtagttttaaatgttttgtatcctaggtaggctacgagcaagccgcctgcaatgagaatgatcaggttgaagactggccatgcctcgaggagcgccccaatgccgtaaaaggccgccgtactcaaggtcatatcgaatagcccgataatagtgatggttaacaggatgcgtggcaatggttggacgagggccgtattgatgataaatagattttgcatcccaatcggtgcaaacgtggcgagacctactaataaaccttgcaggaaatacatagataatcctcctttcttgatggatgatacgtttaggaaaatttggtacgtataataaaagaatagacccctgtgtagtgttataaagtactacatagaaatctattctgtattaaacgaagctttattctattttaccataaaccgataacatgttgcatccctaggctgacgagggtgatgcaaatccagcatgcagcgcctaatgcaagggcactaccaccagatttgataagcttaacaagatttgtattaagcccaatagcaaccatggccatggtgataaagtatttagaaatagttttgaatatgtctaagaagtgaatatccacatttgcataggacaatacagttgtaatcagagaacaaatgacaaagtaaagaacgaacttagggaagatggctgcaatattaacagattcagcgttatcgcttgccttagccgcttgtttggctttgtacacttgataactagcaagacctaaacagatagggatgattgccaatgtacgtgtcaatttaacgatggttgcatattcaagaacttgcgtgcctgtgcccttcatgctatcccaaacagcagcagtagctgttacggatgatgtatcgttaacggctgtgcccgcaaagaggccaaagcccatgttagacaatccaatagcatcgccaagaggtgggaatacgaatgcagcgactacgttgaagaagaatacaacggaaatagcttgtgcaatatcttgatcgctagctttcacaacaggcgccgccgcagcaatggcactaccaccacagatggaagaaccaacaccaattaaaacggctgtgttagaatcgatatgcgtggctttgaatatgatgtaagaaatgataagcgatgtggcaatggttgagatgataattggtaaggaaacccaacctacatgcaatacttgggtgatgttaagaccaaagccgagaaggataacggcccattgtaggatttttttagacgtaaatccaatgccggcgcccgttttttctcgtttccaagatgtgaataaagaaccaataataataccgaggataatagcgaagattggactgccgataaaatgaaaatgctgtcctaatagccaacatggaatggctagaattgcacagagcaatatgcctggcagtgtttttgcattgatacccatcataaaacctcctaactgtacctacttggtacatacatcgctgtggtatcgcgcaggatgtataaataaactaggacttaatagtaacataatcgggggaattagtcgagggggattcctcattaagtatcttgtatacatagcttatagtattgtatcttatggtgaaagttttatataatcttatacgggataattatacttaatgacatatgattcctagtaaaatacgtagagaacatcaatatgtctcatagaatatgcgaggtgcattatgattgatattaatggtatcattgaaaaaaacaaagaatatgtagctaaacatcctgagcttgctcaaaagggtttaactagtcatcctacaaagaaattagccattgtaacatgtatggatacgcgtttagtggggatgctcgaagaatctttaggatttgatcgcggcgaggttatcaccattaagacggccggcaacagcgtaacgcaaccgattgataacatcgttcaaagcttgcttgtgtctacatacggcatgggcatcgaagatgtaattgtcatcggtcatgaaaactgtggtatgattgacttttctgcagaacaatttatggaatctatgaaagccaaaggcattaatgaagatgccattcgcatgattgaaccaggtcttatcgattggatggaccgtttccacatttctgaagaaaatgtacgctatacagttaaattcttgcgtcaccatccattattcccaagaggcatgggattctatggggggatgatggatcctgatacaggggaattccgctacattgaggtttaatcgactactcgatggggccctattacaattctacatttaggctatcaagagccacgcatactctctcgctccaccggccgggtctgactacggcctgcggccttcgcagggccaaagtcgcgcgagagtatgcgtggctcttgctataactatagatgtaattaggtcccatcgagttttctcataaccacaatgtagcggaattcctctgcatttaatgagagagaacaccggcgccgggtctgactccggcctgcggccttcgcagggccaaagtcgctgggaaagggaccctctatttctatttactttgcgtgtaaactagtctcattgggttatgcttacccgctcaatatagcggaatctctctatatttaagagtggaatgtcgctgcgagggtatgagtggctcttgctatagctgaaaattgtcaacctgtatagattgtatatggttgactgttctatttgtaagttttatactgtaattaaattgtcaactaattatatatgcatagttgttaatgctgattcgatatggtaaagaggtgctcgtatgagacagttaggtgtttctattattggtacggatacggatgtaggtaagacgtttgtcacaggtttgcttggggccttagcagtggacgatggttttgatgtgggcatgattaagcctgtgtcgtctagtgcggttccgttttctcaatgcggaacgatggatgaagatgaaatatgcatgggtcttgaaagtaaggatgctacttatttgatgcagtctgtaggtattcctgagtcgcgtcgtcgcgaggtgaatcctattgcattggcaggggattattcaccgcgtttggcggcagagttggccggtgtagagatcgattatccggaaatcgtagatcatgtaaaaacggttgtaaatcaacacgatattacatttgtagaaggggctggtggcattacaacgcctcttactaaggatattacgtttacaaatcttatgacggatattgcatatcctgccatattgattgctgatgggcgtctaggttctatcaatcgcgttgtgttaacgtatgagtatgcaaaacagcatcatattgatgtaaaaggaatcattgtaaatgatacgactgtggtggatccattcttattaaagacgaatattgaggatatggaacggtataccggtattccggtgctcggtgtacttcctccatatcaaggacctaatcaagcgcatatcaaacttggttgggggcgttcgttcttagattcggctaagatttggcaaactgtatggggcatttagtgaaagctctatatacaaggaatctggaattaagtagatagtatagatataaaatcttaagtatgaggtgttatgatggcagagaaacaactttcacaaattgcacaatgggaccacgaatttgtatggcatccatttacgcaaatgcaagactggttagcacaagaacctgtagttatcgaacgcggtgaaggcgtgtatttgatcgatgacaagggtaaaaagtattatgatggtgtatcatccttgtgggttaatattcatggacataatcatcctgtgcttaatcaagcgttgaaggaccaagttgataagattgcgcatagcacattgctcggattggtgagtcctccatcagcgcagttgtgtaaagaattagttgaattggcaccagaaggtttggaaaaggtattcttatccgatgatggtagtacggctattgaagtcgctattaagatggcgtaccaataccgtcaattagtaggtcaaacaaagaaaacgaaatttattgcactcaatgcgggctatcatggtgatacattaggtactgtatccgtaggtgggattcagttgttccatcaagtgttccataatttgttgttcaaacctttaaccttgccaagccctggtgtataccgtgatgtagcagatcgagataaagcatttgaagattccttagcagaattggaacgtatcctcaatgaagaaggagacgaaattacagctctcgttatggaaccattagtgcaagctgcggccggtatgcttgttatgcctcacggctatttaaaacgcgttcgtgagttaactgccaaacatgatgtattcctcatcgttgatgaagtggcaacaggctttggccgtacaggtaaattctttgcttgtgaacatgaaggcgtatcgcctgattttatgaccttatccaaagggattacgggtggttatttgccattggctgctacattgactaccaaacgtgtatttgatgccttcctcggcacatttgaagaaaagaaaacattctatcatggccattcctatacaggtaatgccttggcatgtgctgttgcattggcttcgttgaaagtattccgcgatgaaaaggtcatcgaaggattacctgcgaaaattgaggctttcacaaaagcactcaaaccaatcgaacagttaaaacatgttaaagaagtgcgtcaacgcggccttatcgtgggcattgaacttgaaaaggacgttgctactcacgaagcgtatcgcccaaatgatgcggtaggcgcgaaggttgcagttctcgctcgtgaacaaggccttatttgccgtcctatcggcgatgtggttatccttatgccaccattggcgtccacggtggaacaattggaagacatggttcgcatcgtaggtgacagcattaaacgggctactgaagaagagggcgtattggaagatttgaaaccaatcattctataattaaaagcattttccttgcataatttaaaatatattctatacattctcaaaatacgatgattattctgcatatctatgatactatatatgtatagtatatatattcaaaggaggtcatcgtatggacatttatgtaattatgcaagtcattatcttgttcggtgccatcttcttgggcgtgcgtctcggcggtatgggcatcggctatgctggcggcctcggcgtcgtattgctgagcctcggcatggggatgttcccaggacaaattccttgggatgttatcctcatcatcatgtcagccattgcagcgatttgtgcattgcaattggccggcggtttagattatttggtacgcattgcggaaaatattttgcgtaaaaatcctaaacacatcaactatttagctcctaccgttacgtattttttaacaatcttagctggtacgggtcatacggcattctctatgattcctgttattgtagaggttgcaaagagcgagaatatcaagccttccgttcctctatcaattgcggttgtagcgagccaaatcggtattactgcaagtcctgtatccgcagcggttgtcgctatgagcggattccttgaaccgtttggcgttagctatccgaccttgcttggcatctgtatttctacaacctttattgcggttatgattactgcatttatcatgtcgacctttgcgaacaatgatttgtcctctgatcctgtttaccaagaacgtttggcagcaggccatgtggcaccacctcgtgaaaagaatgtggatttccatctaaaaccaggtgcgaaaaaatctgttttgattttcttaatcggtatcatttgtatcgtattctatgcaacagcaatttctaagaatattggtattattaaaccggttatctttggccgaaatgatgctatcgttggctttatgatgattattgcggcggctattacattcttctgtaaactagatacagcacaacttgttaacacaagtacattcaaatctggtttatccgcctgtgtctgcgtacttggcgtagcgtggttaggagatacctttgtaaaagggcatattcctgaaatcaaagccatggcatctagcatggtaacagcatatccattcttgttagccgttgccttcttctttgctagtacacttttgtatagtcaagctgcgactacacaagcacttgtgccggccgtaatcctcgccttaggtattacaccggaaaatacgggctctgtatatatcattatcgcatcctttgcagccgtatctgcactctttgtattgcctacatatccaacacttttgggggccgtgcaaatggatgatacaggttcgactcgaatcggtcatctcgtatttaaccacccattcttcatcccaggcgtactggccattgctatttccgtagcacttggcttcgttattgctccattgatgttgtaattggtgaaagtctataaaatcctatactttacataataaatagggcgtggtcatgtacgatcacgccctgttatattctataaaatagaaacattataggaaaaatgctatactataggtaagagagggatacatatagtgtggttaagcaagagtatataggagcctattatgtatacgatttctatcaagctagatatgaatcgcattccgccggaagtatccgaggcattgagagagaaacatcatatctggtataaaacttattttgatgcaggtaaatttttaatgtttggcacccgtccagatgattctggtgaaagccttattatcgctcaaggaacaaaagaggaattagaagaggctgttcaatttgacgcatactatgcggatcaactggcaacctatgaaattagagaatataaggtagcattgttcaatgaagcgattaaaaactatatagattaatattggatattccatatgaaagggcccctagtttgttagactaggggcccttttgacgttttatttattcttacagtctttacagattcctgcaatctcaagatggtgttctgttactgtaaagcctgcatctgttagttcctgcggcatttctacgacagggcaggtatgtagaggtatcatagttccacattttgtacataccgcatagtgacggtgcgtatggggtgtaatttcgtagtacgccatgtcgctacccatgatggtggtacgtgtaacgatatcttttgtttctaataactcaagggtgcggtaaatggtagacatccaggtggtgctgccatcgcctaatcgttcagcaatttcgatggcggtaatcggtttatccgttgagtttaatacggaccaaatagcctcgcgctgtttggtcttttttatgccttctggccaatgtattgtattcataataacgctttctatcatggggtaactattaactgtatgtactcttgtacacatactatttatttactaaattgcatcctccgaataatggatttaatattcttgatgatgagtactaccaataggatgaataccgatgtaagtgatacaaagccacctggcgccacgttaagataataggatccgaataggccgataatcatggccagtaaactaaatccaatggagcagagtaaggttgttctaaaacctttttccaattgtaatgcagaggctaccggtaaggcgatcatggcacttaatacgagaacgccgacgattttgatggaaatggatacggctgccgccattaagatagcaaatacatagttaatcaaatccacttttacacccgctactcgtgcggcctcttcatcgtaggcgatgtagagcagtgagttgtagaggaaatacaaggttaacacagataatatggtgagtactgcaatgctaatcatatctgtagtatttacggttaagatgctaccgaagaagaacacgttagcgttagctttcagcttgcccgaactgatgagggtaatggctgtaccgatgctgagagataagatgatggtaagaattaaatcaagatgatgagaaaagtattttcgcaagaactcgataagggcgccgcagatagcggtgaatatgaaagcccctaatatagggttcgtattggtcaataaaccgagggtaatcccggcgagggatgcgtggctcatggtgtcgccaatcatactggaccggcgtaataccataaatataccgatgcatgggcataatagagaaatgcagactgctacgaagaaggcattttgcatgaaatcataattaaacatggcgcacctccttagatgttgtatcctgagcctgagccgtcacgtctgtaaagcaggaacagttttcatggcctacaggattgcatcccgtgttatgcatgatttcgcaagcatattgttcaggggaacagagatgaccttgaccatttgcaatgtgatagatatttgtcgaatttgcaagagccatttccaaattatgctctacagaaataatggtaatatggtgttcctgatttagtgtgcgcaagagggcataaataccttcttggctcttgcggtcgatgcccgttgatggttcatcgagaatgataaggtctgggctaccgataagggcccgtgcgatagaaacgcgctgtgcttgaccgccggataatttgctgatgaggcggtctttaaactccgtcatatgtgtgagctcaagaacgcgattcacttcatgcttatctttgatgttcaatagcttgcgataggaatctagaatttcatggactgtaataggaaatccagcatgggagaaatcattcttttgtgatacataacgaatattgttcgtgttgcatgtgatggaaccttttacaggcgttagaaaacctagaatgaggcgcaagagggtgcttttaccagaaccattatcgcctacgatagaaatataatcaccgctatgcacctctacgtttaaatcatttagcacatagggcggttgaccttggtatgaaaaataaagatgttgaattgataacataaaaaccacttttctgattgacaaaattattactacgtttatactataactatattacaaatgcaactgagtcgcaactgcaattaaagaatactatatatactataatagcatgagcactcaggatttagaaaaaggaggcctactatggtcaagaaactggtattgttagtagttggcgtgctgatggctgctctatttgcaggctgtggtaatgatgcgccaaaggaacaagcaggtaagaaaatccaagtggtaacaagttttaatgctatgtctgaatttgcgaaggctatcggtggcgataaggtagaggtatctacgattattccagatggtacggaaccacatgactttgaattaaaaccagagaatatgaaacaattagcatcagcgcaagtatttgtttataacggactcggcatggaaccttgggcgcaacaagcgattgatgcggctaaaaacgacaaacttgtatctgtgaaagcatctgacggtgtagaggctattaagaacacagatcctgacgaaattaaagaacatggcgctgaagaccctcatacatggttgtctttgaaaaatgctaagatcgaagttaaaaatattaaggatgcattggtaaaggtagatcctactaataaggattattacgaaaagaactacaatgattatgtggcaaaattagatgcgatgattcaaaaatatgaaggtcaatttgcaaaagctccacacaaaaactttgtaacaggtcatgctgcttttgcatatctatgccgtgactttggattagaacaaaatagcgtagaagatgtgtttgcagaaggtgaaccaaatgcagcacaattggctaaactcatcgaatactgcaaggaaaataagattaccacaatcttcgcagaagaaatggctagtccagaagtatctaagacattagctcaagaagtaggcgctaaggtagaaactatttatactatcgaaagcaaggaagacgataaaacatatcttgaacgaatggatgataatttgactaaaatcttaggaagtttgcaataactttttatgagtaaaattaaactatttataacataaaaatataataaaattaaaagcaaggtatattctataccttgcttttatgttataatgaatgagcgtttcatgaaaaaatgtactatttatgtgcattgacgcatactttgtattgtgttgtattaataagtattaagaggacatatgattgaattctttgatcgattagtagggcctatcgatacggatggcgtacgcatatatcgtcaacgtaccagtataactcaattagtcgtgatgatggtgctagccgttatatgttaccaattcactgctataggtgattcggtatatacggaggctatgaaacacttcatcatgaatcctaccacatttatgaaaattgaacaacttcctatggttaatatcattgaaatcaatggattgctacaaaagttgagtacgacgacacctctttgggatgtgagcagatggttattgctgattgtgaaagctttagttatggctatacttatcagcggctatgcattatggcgtgctcgtcattgctatacgatgactattttaaccggtgtattccactgtattgcatatgcgcaagtggtaatcggtatctacatgttaagcattggtgtactctttgctttcgctaaagcgcctgtcgtcctcgtgttgttattgggcgtgtttcttacgattatttgccttcttcttaccatgtccttaatcaccgtggtaggacgtattgtgggggcatccgtttcgggcaatgcctttgaaggacttctcgttatatgcggtgcgtacatcatctgggtaggcataaaatttttaggcatactactattttaaaaagacacattccgtttttggaatgtgtcttttcatcgttatatagcaactacgcatgatttgtccgataattcttatttgtcatggttgttgttttcatattcattaaataagaatgctacattatcttcatcgtattcgatttgttcagaccatcgtctgatttgttctggtagatttccgaattgatgtgttagcagtgctatgaatactgtggcgtcaaaggcgtatcgcacaaggctttctaacgagtattctgcaagcatatcaatttggcggtataagatgtattgatacaccttgttgagtgcggatacatcgatggtgtcgaccttaagtaagtccatcgtagttgatgccgttgtcgatgacagcatggcctctaaatgggctagttgatttgtccattcctcatcgataggctccgttttcttatatacagtgactaactcttggcagtagtggatagaatgattgagtgtaaactgacaaatagcaggattaatacctaatgctaagaggtcaaagatattttcgagtacgggacggtcttcagcagtaaattcgccgtcatcatcttcgatggtgaattgcaattgatcgccttcggtagctagtaacttttctaccgattcttcgcaggatagaccgacgccacagagctcgaggtcttcgatatatttatagaaccgcggatgcatatgacaggtatcgcataaactatcttcgcctagttctaagactacgcggcacaatccatcttcccgtagcaacggacaggtaggctgtttgtcgctaaacatgaaataatagccttcgtcatcgacggtcataaatttccgcaggtcttcacctaatggtgtaggcagtgtttgatataatttagccgtctcctcatctacatcgatagtccacttttgacagcatgtatgatgacattgattggctttgcattgaaatgtatggtaaaaggttggatataaagaaatcatagtactcacttgtatatattattaactactgttttactaattaaattgtaacatacgcaatctattcgtgggtgttattttagattatgattttgttcgtgaaagtcctaactattgtgtataatagtagtatacggaatatttactaatactatttatgtaggaggaaattatgaaatctatgttcgtaaaaggcggtattgcattggcactagcagcggcatttggggtaaatgcaccagttgttgatgcggctagtattgtaccggtacaaccgacagtagcagttgttgatgctaatcatgcagccattgtaggcgccaatacattgctcaatgctttcattcaacaacatccaaaagcagcgattacagaaattgcatttgatggcgaagatggtcaaattaaatatgaagttgaaggctttgattcaacaggtaagtatgagttgaaatacaactacaatacaaatcaaattggtgaaacaaaagaaggcgcatacaaggttggtttagagaaaaaggcctttgatcctactcgtattttaacgccagacgcagttgtaaactttgcctttgctcaaacaaaaggccaagcaacaagccttaatagctggtctgtaaaaaatgaaaaaggtcgttttgtatacgatgtagcatttggtgccgctaatcaccaagaaattgaagtgcatgtagacgctttcacaggtgaacttgtatctgtaaaaggcgtaaaataggtgtatttgacatcttactgcaataggagtaggatgttactatacacatgctggtatagctcagttggtagagcggctcattcgtaatgagtaggtcgtaggttcgaatcctattatcagctccaatggccacaaggttaacgccttgtggcttttttgtatgtgcggagttttttctaaaaatttactcatgaattatctagctttgtattatattgaaaaaattgatatttgatagcttgcgttatgttatatagcatgggctttcatagaaattatcagccataatatgaattgatgattcatgaatcccatttgtaaaaacgctatagaaatttagccaaaaattcatatatatttcatgcaataaattgggcagttcagatatcttaatttacatctcatacgcggtggctaagatggtttcagttagccgccataggcctaggtggtaaacagtaaagttcataaatagtctactataccaatacacatacatcgcgccatcccatcggcgccctggggtgcatacatctcccagtgcaccccgatgcgggccctttggtggttcagacatacattgactctctcctatgccgtctgtcgccttagggcctccttatgaaggggtccctcccaattcataagtatatacatgatgtatataaatatctctctcacaacacacaatacacacaacacacacaatccatatgtgtatggtataggagaaaaaaagcaccaccgaattttcggtggtgcttttacttttgcggatgacattggaatcatcaatgtcatcctttttgtgttatatgtattgtcgtggcacgcgatcagagaagccacagaagatttcataaggaatggtggaggcgagggctgcgatttcaagggcagagatgctttcatgaccttgagaacccaatagtacaaccttgtcgcctggtttaaccgtaatcgtatcaggtacagccaccatgaattggtccatacaaatacgtcctactacagggcaacgggtaccttggatgaggacggtaccacgattggataggctgcgtggataaccgtcagcgtagcctacaggaatagtagcgattgtcatcggctctggagtaatataggtagaaccataaccaatgccttcgcctgcttcgagttgttgcacgtgtacgacttcactgtggagggataggactggtttgaggcctaatcggtttggtacatcgagagatggcatgatgccgtattggatgatacctggtcgtgcatctgtgaatagactatcctttacggataatagaccggcgctgtttgccaaggagaagcgatagtccgcatcaggtctaaaggcacggatttcgtccaccattgtatggaatttttgcgcttgcccatgggcgtggctttgatctgctgcatcggcattgctcatgtgtgaaaagaatccatctactgcaagattgggataggattcaacgcgcttaatgaactctaccgcatcctctggtttaatgcctatgcgatgcatgcctgtatcgacggctacggcaacgcggataatcatatcgtgattgtccgccactttgttgagggcctctaaatcggtagattcgcaaacagcaggaatggaattcgtatccgctacaagttcaaaggattgtggtctcgtaaggcccaataggtaaataggcaccataatgccagcattgcgaagtggtacagactcttctggaatggcgacggctaaggattcataaccttcttcaacagcaatacgccccatcataacactaccgtgaccatagccattggccttgataactgctgtggatgtactccattcagggaggctgtcttttatttttcgtaggttctcgcgaaccaagcttgtatcaatcgttaaatatgttggtctcatgatcatttcactcctaaaatacattacttttattgtataacttttagggaattaaacaatagtttttgtgaaagtttatgctaaaatttcatttgtactactattctaggagagattagtctttatatgcataggccatgatgaattagcatataatatgtagtagcttgtagtataattaatatataatacatttacccttaatagaaattgttaggaggatatgatgaacgaacgagttgtagtagttaacgctggtaagatgaactacgatcatttactagatttttctgttttatcaaatgatgtacaggtctatgacgatagcactaatgaagaagttattgaacgtattcaaggggctggcgtggtggtgaccaaagaattgccagtaggggcggatttactctcacaattccctgactcagtaaaactcatcgtagaagcgggtactgggtataataatatcgaccttgatgcggcgcgtgcaaaaggaattacggtgtgcaatatccctgcatatagtacggaacgtgtggcacatactgtgattatgatgcttctcaatttttcgtctactatgcagcaacaaatcggtatgcttgctaaaggtgaccgtagtaattttacaaaatatctacaagttagccatacagaagtaaatggtaaaacgctaggtgtggttggcgctggtcacatcggtatggaagtcatcaaagtagcaaaggtactaggtatgaatatcttggttcatacgcgcacaccaaaggcagatggagatggcattcgttatgtaagccttgatgaattactagaacatagtgattatattaccttacattgcccattgaatgagcaaactaaacatatgattaataaggatacaatcgctaagatgaaatcatcggcagtcatcattaatactggtcgtggtgcacttattaatgaagctgatttatgtgaagctttagttgctaagcgcatcgctggtgcaggccttgatgtacaagaggtagaacctccagtagaggatagccctttatatacacttgataatgttattattacacctcatatgggatggaaaggcttagaaacacgtcaacgcttggtaggcattattcgtgataatgtacaagcctttttgaaaggtgaacctattaatgttgtctcttaatagatagacaaataacccctgaccggttgtgtggtcaggggttattttcgtttagggctagatcatagatcaagtttttaatatatatagtatatatatcaagggaggtagttatcctcaaacttgattatgattagtttgtgttttgatgggacaccaccaatgtctacgatatgcttttatgccttctacaacggttttgctcgctttggcagctaaatcctttgtagcggccgggatgccatcaaggcggtaagtgatacctaattccttgtatttagcaacacccatcacatgatatggtaaacagtcgacggcttgtaagttgcgtagtgagcctaagaaaaagcctagcctatagtgacgatctgcgttgtctgtaatagtaggtaccaccacgtgacgcacccaaatcggcacatttacatcagctgtcagttttgcaaattgaaggattggttctaaaggctgtgcggttagccatttgtggacagtaggatcgatgtccttaatatccaaaatgacgagactcgttacgctcagtaacttacggtatgccacctcttggtggggatcaaaacaaattccacttgtatctaaacaggtatggacgtttctttcactaaaatatgtgaaaagctcgatgacaaagtcaatttgcatcaatgcttccccacctgtgacagtaatgccaccgttcgtatagaactgacggttacgttcgtattgctgccaaatctcttcgacggtcataaacttagcttcttggctttcttcattccacgtgtctggattatggcaataggcacaacgcatggggcatccttgaagaaataccaccatgcgcatgcctggaccatcaaccgtacccatcgtttctagtgaatgaatacgtcctgtcatagaaaacctcgattagatttgttgatggaatgtacgggaaataacttcatcttgttgttgtttcgtcaatttgttgaagtgtactgcataaccagatacacgaacagtcaattgaggatacaactcaggatgtttttgagcgtctaacaatgtttcacgagtgaacacgttaacgttcaaatggtgaccgcccttttgggagtagccatccaataattctaccaagttatccacttgttgttggttgctcatgggtattcctcctttcaaccaaaatatgagtactgatgccggtgaaagcatacaatacggcggaagattatttatcttcctctatagtaacatttggttcgctgcaagcgaagtttgtattgctgttaggcaattgagaagggtctaactcaatatcaaaatcgcctacggatacaaatgtttcaccagatttacctaatgcgtctggaacgatggagaaggtattggaaataccgtcagagcaatcgcgccatggcatttttgcaacggaagataacgaagctacggcaccgtgagagtcacgaccatgcatagggttagcaccaggagcgaaagcttcaccagctttacggccatctggtgtggaacctgttgcagtaccatatactacgttagaagtaattgttaacaagctcatagtaggaacggattgacggtatgtagggtgtttacgcaccttgttcataaatgtggaaacaaccatggaagccaagctatctacacgatcgtcatcgttaccatatttagggaattcaccttcgatttcgaaatcaacagcaatgccgttttcgtcacgaataggttttaccttagcgtatttaatagcggacaaggagtcagctactacggataaaccagcaatgccagttgcaaaccagcgagttaccttgcggtcatgcaatgccatttctagtttttcataagcgtatttatcatgcatgtagtgaatgatgttcaatgcgtttacatatacgcctgccaaccattccatcatgtcgtcgaatttttcccatacttcgtcaaagtctaagtattcggatgtaatagggcggtatttaggaccgatttgtttcttaagtttttcgtcaacgccgccgttgattgcataaagcaagcattttgctaggttagaacgagcgccgaagaattgcatttctttaccaatacgcattggagatacgcaacatgcgattgcatagtcatcaccggagttaggacgcatcaattcgtcgttttcgtattggatagaagatgtttcgatagataacttcgcacagaaacggcggaagccgataggcatgcgaggggaccataatacagtgaggtttggttctggagcaggaccaaggttagtcaatgtatgtaggtaacggaaggacattttggaaaccaatgtacggccgtcagtacccataccaccgatagattccgtagtccaaacagggtcgcctgtgaacaagttgttgtattcgtggatacgtgcaaagcgaaccatacgcaatttcatgatgaaatgatctacgaattcttggatttgttcttcagtgtatgtgccgttgcgaaggtcgcgttcagcgtagatatcgaggaatgtagagttacggccgatggacatagcggcaccattttgttctttgatagcgccaaggtagccgaagtaaatccattgcatagcttctttaacatctttagctggttcggaaatatcgtaaccataggatgcagccatttctttcaattctttcaaggaacgaatttgttctttgatctcttcgcggtctcggattatgtcctcaagcatatcacccatagtgatgttgaattcttggtttttctcttcgattaagtaatcgataccatatagagcgatacgacgatagtcaccgatgatacggccacggctgtatgcatctggtaaaccagttacgatgtgtgctgtacgagcggcacgcatttctggagtgtaaacatcgaatacgccgtcattgtgcgttttacggtgctttttgaagaagtcctctgtttgaggatccattttaaagccatattcttcgatagcagattttgctgtacgaaggccgccataagggaacatagcgcgttttagaggtttatcagtttgtaaaccaacaattgtttcaaggtctttgtcgatatatcctggcgcatgcgcagtgatgtgtgttgccacggaagtatcggcatcaagcatgccacctttttcgcgttcttcttcgtatagtttcattaccttgtcccacaattttgtagtacgttctgtaggaccaactaggaaggagtcgtccccttcatagggaacatagtttctttggataaagtcgcgtacgtcaatcgctttatcccacacacctgtgttaaaatctttccatgcagtatgttgcattttgcacctccataaatggatataactatagattttgatatatctagtgtacaatgtttatctaaaactcacaatatataaatgatattaattttcaatacatactatgcaaatttcgtaagaatagatgtaatttgtattgtgaaagtaaaatatgatacttcaatatactgataatattaatagtttataagggattctaagtctgcttgttgtaatattctatatatataattatttatagataatgaaattacatttcagtttataggctgatttatttattgttcatatagtttgtttgttgataggtgatgacattttattcttttgtgcctataattgaatacattacttatataaattagatgtatagtaatgaaatagattacatataaggaaaggagattggtcctatgtcaaaccgagtgaaaactgtcataggtggattagcgactatagctgtttgggcaacggcgtttccgtttagtaaaattgccttacaacatgtagatcctttaacactagcagtagcccgcgttgtaggcggagctatcctcctgcttatcattggagtagctaaaggcttacagattcctacaagctggcgcgagtgggggttatacatcgtacttggtatgacgggaaatttcgtatatcaagttgtgtttaatcagggccttcttaccattcctgcggctacatcgagtattatcatggctttgacgcctatgacaacagcgcttatggcattagtcgtttacaaagattttatgaggcccattggttggctatttactatcaccgcctttgcaggcgtggccattattattctttggaatggccctatcaatgtgccgatgggggccttttggacattattcggtatgatactctttgcaatttataacatcgtcaatcgcggattgagtttgaaagggcatgaccctatcaccgttgctacctggtctatgttcaccggtgcgattatggcattaccttttgtatctcaatcagttgcaaccattgtggtagcaccacctattgcatggttagctattatctatttggcctgcttctcgagtgcgttgggtttcgtattctggagctatgccctggagcatgcagaacatgtatcggatgtaacaaactttatgtatctatctcctgtcgtagcagctatagtggcggctatacttattggagaaattccagatttaggtctttatattggggcaccaatcatcttatgttccctatatatgtttaataaatgtagatgatcaattgaattaaacatcattgttttctccttgttctctagataggttcatgatatacttttactagagaaacgtgctatgcatatgcacaaataagagaaccactgataagttgcagcttatcagtggttcttttgttttacggaacaacccgaggctagttaccaattaacaaaaatagcaagtctaaccatttacaaatataataagaaattatatttatcatgactgctaagagaagagaaacaaacgtactacgcataatgcacctcccttccattaccggatttggaaaggttggtaacatctttattttagtattaatatttacattggagtatattaaagaaatgattaatatcgaggaagatagagtatatatttatagagttttggatatcatttttcacaaaatttataaatagtccaatgttatgtaagcaatagagaaaagaaaaccctacacaagcacagcgactttagtagggcaaggctcttggccttgtccgttaagctagctggagcgagcatgtgtagggttttctttcatattaaatactattacctaaagtttgttgtctattaataatatttatgattaaaatcatgtaccgtcctatagaattctgatatactagacgagcatttttgcaaatttatatctttaagtaaggagagtttctaatgaagttgaattggaaattattcgcaccgcttatagtagctattcttgtatggctcatcggtgctcctgaaggtcttagcgtaaattcttggatttatgtaagtattttcgctggcctcgtggtagggttgattttagaaccaatgccaccagcttttattggtatcattgctgttaccgtgtctatgttatttaaggtggggcctgcacctgttgtagataaagcaactggtgtagcaaaagcgattactgatgcacaagctatcagttggggccttagcggcttctctaatgccatcgtgtggttgattttcgcggccttcatgattggtattggttatgaaaactctggccttggccgccgtattgcgttgttcctcgtagcaaagcttggtaagtcctccctaggccttggttatgccattgccattactgaccttgtgttggctccatttattccaagtaatgcggctcgttctggtggtacgatttacccaatcgtatctagtatttgtccgatgttcgactcctatccagataagaatcctcgtaaaattggttcctatttgaactgggtagcattggcaactacatgcgtatctagctctatcttcttgactggtgcagcgcctaatccattggctcttgagttatctgctaaatctggtattgtagcagcgaactggggaacatggttcctagcattcttgccagtaggtcttattttgttcatcatcactccattgttgacctatgtattctgcaagccagaggtgaaaggttcccctgaaatcgcagcatgggcaaaagatgagtataaaaaattaggtgctatgacacgtagtgaagtcttcatggccttgatttctgtattggctcttgtattgtggattggcgcttctacgttccatattaatcctacaacaacagctttaattgttattatcttgatgattttcactaaaatcatgacatggcaagatttccttgctaataaacctgcatggaatgttttgacttggttcgcaacacttgtgcctatggcttctggccttaaaaatgtaggctttttggaatggcttgctaaatctgccggtggttctttagtatctttagatcctacaatggcagttcttggtttattactagccttctgcttgcttcgttacttctttgcatctggtacagcttatgtaacagctatggtaggtttgtttgcgactttgattctgcaaattcctggcgttgatccagctcaagttatgttaattcttttagtaccaatggggattatgggaatccttactccgtatggtacaggtcacagcccaatctggtttgctagtggctataacaaaggtcctgaattctggaaattaggggctatctttgggattatctaccttgcgatctttatcgtggtgggtattccatggattgagttcgtaatgccacttttaggctagttttaaagccctaatatatctctctgcgctccagttcttcgcaagtcgctcgatagatatattagggctttttctatccaaaattggcattacatctgtaggaaagtcgcgcttacagaacgcttcgtgggtctttcataacctaaaatgaaatgctagattgtgttataatagcgcatataggggttgcatataaacgcgaggtatatatgtctattcttgaacgtacgatacaatcagtaatatttgaactgggtgcgattttaatagggatgttggtcattgagtttgttccccatgaggggcaaccgttgttgctgatgatattaatttcgctgactgcagttatatggaactttatatttaactggatctttgataaattagtaccaggtgataggttggctcgaggtctcgtaattcgcacgattcatgctgtattgtttgaaggtctattattggcggctacggtaccaatgattatgtacatgatgagtatcagcttatggatggcgtttattacggatatttcaatgaccttgattatcttggtatatacatatgcttataactgggtatatgaccgggtacgtttattctttgtgaaagcttaatctattggtttgaggtaagtacctcttgtaaaatttatatcgtataaggggaggttcttatgtctacaaaatctattactggcacaggtcttttgttggccattgccttgttggcacaaagtttgcgccttatgtttccattcattccaaaccaagtcagcatgttccttatcggttccatcacatcggctacatttgtgctagccacatggcgctatggttggaaaaatggcttagttattgcctgggttgcgccagttgtagcacatttacaaggtatgttgccattgccaccatttatctttattaccggccttggcaccactgcttatgtactcgtggcgtattggttacaacataaatcaacaatactgcttattatcgttgctgcattggtgaaagccggtgtgctatttggtggatattcgttgttcttttctttgttccaactaccaccaaagattgtaaatgcgatgttatttgtatctagttggccacaacttgtgacctcctccttaggtattatattggcattgctaattatgaaacgtgttaaataggtttgagaacttatttgtagtaaattaaatatacaataaaaaggtgttaccacattcttttgcattgataaccgttagtactgtttcaatagaggatgtagtaacaccttttttgagatattctattgttttttcttaaaagattttaggatgaaaccacccacagtcccagtgataccaaaacctaagaggcccatgccaattgtatgcattaaaatactgctttgattgtttttagaaatctcttgtgctgcttgcactgcgcttgtagcttttttggctatttccacattattagctgatggatctggaataataaataagattacgatagcaatgattagactgataataccagcaatgaataaatactttccgcgttgatttactttttccataataccctctcctttatatattacgaaataagatatatagtattcatcttgattgtatcctgtatgtatataaatgtaaattagtaattctgttatgtggttttagggattaaatgtttaatgagtccgataaaaactaagtgagaagtggtagtttatgtgtaaatgatactctaagaatgtacaaaaatgatgatataagaatgtacaattttaattgtatcaccgatactatagttgaggtgataacaacatgcaatacgtatacgctattaacagttcatttactgtaacatcattattagacttaccattattaagggacattctggaggtttgcaatttgaaacctaattatagtttactaggtcgtgaattaggctatgatagacgcaccataaaatctcattatgaaaatggaacgcctgatccacatcgtcataaaccatctatgattgataaattttatgacgtaatacagactttattatctgatgatacaccccaacaattttattataagcgtgtcttgtggcaatacttggtagataaccatggactcacagctgcttactctacatttcgcggttatattttaaagataccagtatttcaatcctattttgatagaaaacatacatcgcctagtatgcagcatacgattcgttttgaaaccgcaccagctgaacaggctcaagttgattggaaagagaatattaaattcctattgcatgatggcacacacataacttttaatatattgctgatgacattaggctattctagatacaaattagcaaaggtcactttcgatagaactactgaaacactacaagatacattggtagaattctttgaacaattacaaggtgttccgcatgtactattaacagataatatgaaaaccgtgatggtacaaccgaggctagctggaactaaaggacagcttcataccaaagcagaacaattttcaagtgactttagctttacatttaagccgtgtatggcgcgccgtccacaaacgaaaggcaaagtagaaagccaaatgaaaattctagatgaaattcatgcgtaccaaggaaaattaacaatacaagaagtggaagaacagattcaaaaaattattttacgtagtaatctagcgatttctcaagctacaagacaaataccgtctgcactgcttgaaaaagaaaaggaatctcttaccccacttccaacaaaagtgataagagattcctaccgcatagatcacccaaaagctaaggtttcagcaagtaatctcattagctttcgtggtagccactattctgtaccgccaggatatgtggccaaatctatgaccttaaagaccatagataagatgctatacatatatgatagcacagaattgattgcacagcacccattaagtgataagaaggttaactatttgccttctcattatgaggcacaattgcagaaaacaattccttatctaagttctgaagatgtgaaagctaaagcaaaatctaatttggaaaagataggagctatctatgacactacagactaattaccaacgcttacaagataatctagcatatctaaaactaaaacaatgcatgttacacctagatgaaacaattgaattagctaatacacagagcttatctcatattgagtggttattgaagctgagtgattacgaagttgatattaaacgacaaaacgtaattaaccatatggtgaaaattagtaattttcctcatttgaaaacactagctgattttgaattttcatttcaaccacaaattaacgaaatgcaaattaaggatttagcatcattaggattcatggaacaagctgaaaacattgtatttcttggctctagcggagttgggaaaacacatttagctacatcactaggtattgaaagctctcgtaacagacgaagcacctattttattaaatgccatgatttaattcaaaaccttaagagtgcaaaagatgaaggacgattagaaactcggctcaagcattatgcacgctaccaattactcatcattgatgaaattggctatttaccgttacaaccaggtgatgctaacttactatttcaaattattgatagacgatacgaaaagaaaagtaccatcgtaacgtctaacattaattttgatgagtgggctaccattttacatgatgagcgagtagctaatgctattgttgatcgattacttcaccatgcacatgtgattagtataactggagattcataccggttacgaaaccatatgcaacagaaggaataactgtacattgtacatcgtcaaaattgtacattcttatattgacatttacagtttatggttagttttaaaatatgtactgatatatgtttgatggaaaaggtgagtatattttgtgaggtatataaaaatacataaaagtaattaacaattcaatatactgtttagctagtattcatgtatggttcacgctaaattcatgaaggtagcgtgggaatgatgtattgtagatttctgtatcttattaaattattgattatttataagcaaagtagcttattaggggagaagtacataaaatattccgattttaaagctcatcataaaaattgatgagtatattaataggccgtagaacaatagtaatcaagctatttttggtgtgtataaagagttattaatgaactttatatggaaaaaagtcttgtacatatcgtaaaattttgatatgctatgcaagtaattaacaatataaatttttcttaaactgtattaaacatatttctttatgagagaaaaaatatgtttaagcaggctaaagagagaggcgaatagagaggctgaaaaattgtattgtatattgttaaggattttaatttagtgagggtgtaagatgagagaaaacaaacattccaaaaaattagcgtttgcagtattggctgctacagctgctgtaggcgtatccgcagttgctcctgtaagtgcagcaactccaattacagctgctgatggtttaattgtaactagtgatacaccagtatccagcaatgtgacagtaccaacaactgtagtaacaggttccgccaatattgcagtaggccaacaaaatgaagtgcacagcacatccggttccactagcgcatttggtaaccaaaactatgtaaatggtcaagatgctaacgcttttggtgatggcaatgcagcatttggtcattatgcacaagtatttggtgatacaaatgaagcaaatggtaatcaaacagtagcatatggttataacaatattgtaggtgaattccaagcaacgacaacaccaacagattcccatcgtgttgatccaactactgcagcaaatcgttctgctgctgttggtgtacaaaataaaatcgctggtggtgcagaaaatgcaacagcttttggtgtaggtaatacagtatctattgcagaccattctttccgagatcgtacaagcgataatgaagcggatagtgctacacgtcaagctggctcttatggcgctaactctgtagctgttggtaattctaatactgtaagtggcgatgcagcaattgctattggtagcaaatctcaagcaacattaagcaatgcaactgctattggcaatactgcaactgctaatcgtgttggaactatagcaatcggtacacgtgcacaagcaggtgattttgttgctaatcctaatgtcgctacagatgctcaattggctggcaaattgtctgctcgtcaagatggtgcagatcgtgccgtatctgttggttatgagagtcgtgccgttggatataaatccaatgcaattggctctggcgcatgggcattagataatcactctactgctattggttcctctgcgcaagccacttctaaccatgcacaagcttttggtgcaggtgcacaagcgacaggtgtgcgttctaatgtattcggttcagacgctattgcaaacgcagattatagcattgctattggtaataaagcgaatgcatctgttgcaaattccatcgcattaggtgctgattcaactactcgtgcagcaactagtgtaactaatggtgttgtagcaggtcatacatttggtggctttgcaggtacaaatcctgttggctctgtatctgttggtaatacaaatgaagtacgtcaaattcataatgtagcagctggtaaaatttccgctgactccacagacgctgtaaatggtagccaattgtactccgtagcaaatgatttacaaactcaaatcaacaactccacaccaggtcaaatcaataataatattactaacttgaataatcgtgtaggcgacgtagaacaacgcgttaataaagtaggtgctggttctgctgcattggctgcgttacatccattagacttcaacccagatgataaatggacagtagctgctggttatggtcattaccataatgctaactctgctgcattgggtgctttctaccgtcctaatgaagacacaatgttctctatcggtagcacagtaggtaatggtaatcctcaattaaatgcaggtgtatccattcgtcttggcaaacgtgcacctgaatctcgttcccgtgtagctatgggccgtgaaattgctgaattgaacgcacgtcttcaagatattgaaaacaaatacaataacttgttacaagtattgaatccacatgcaatcgatcctagcaaaactgctgaattcccagatgttcctcgcaatcactgggcttaccaatacattagccaattggctggtaatggtatccttgttggttaccctgatggcacattcaaaggcgatgcaacaatgactcgttacgaattcgcaactatgttgtatcgtgctcttcaaaacggtgcacctatcgatgataacatgcgtcgtgctatggacgaattccaacctgaattacaaaatattcgtcttaaccattatcgtgttgaccgtatttctggtggcgataatgaccgtcataaaacagaacgtgttcgcgttaacaacgaacctaaaaatcaacgcgacgtatatggttcccgtattagccaataatacattgactataacttcccctcgagcttgtgaaagctccaaaacaggatgtatcctcgtgatgcatcctgtttttgcttattataaagattataaaacttcatcaaatatttatgtaaaattattgcatttagatacatataggagtataattacatttataataataaatatacagaatatatgtataaaatataaaaaatagtagtttgataaagatataaaatgagggcaagacaatgaaagaattcagacaattaacagtagaagatacagcggaataccataaggttttaattgatggttatgcagctattaaagattttccaatcacctttgacgccatcgattttaccgaagaagaatctaaagagtggattgaaacctatcctgtatatggattgtatattaatggacaattagtgagctctattacattctgcatgccatgggttaaatactctacaccggataaatttccacatattgcccatttcgtaacagcaccagctttcaaaggcaaaggctatgcacgggaaacacttggttatgcagaagagttgttaaaaactcaatttaagacaccagccgttacattgggtacggctaaagagcatccatggttgcctaagatgtatgaatcctttggatttaaagcttatgataaagtacattttagaggaaaacaacatacaacggtattgtttaaaaaagacttgatataactaatacaagcacctcgtgaggatattcctcgtgaggtgtatttttttgtacaagatagtgcagaatttttacatttagatatataatatatacatatatgtcatatctatgcgttcgttttgaatggtagatggtttattgaaaggatgtgagactatgttagtcttatctggtattttagtgatggtcatcggtctgatgctgcgctttaatgccttgttagttgtcgtagccgcaggttttgtaacgggccttgcaggtggtctcagtatcaacgatatcgttggtgccattggggaggctttcgttaaaaatcgttatatgtcattatttattttgattttacctgttattggtcttatggaacgtcatggtttacgtgaacgggcagaaattttgatcggcaagatcaacgctgctacggctggtcgtatctttatgatttacttatttgtgcgccaagtaactgtagcttttggtattaacatgtccggtatggttgccatggtacgtccgttgatcgcacctatgagtgaagctgcagtagctcaaggtcgccccgtatctcaacgtactcttgataaggtgcgtggtgtagctgcttctgcagataatacaggcaatttcttcggtcaaaacttgttccttgctgctggtgggttattgcttatcaaaggtgttatggaacaattaggctattctgtagagttaacagatatggtgttatacggattgccaactgctgtttgtgcctatatcgttaacttcattcgctttattatctttgataaaacaattcaagcctctgtagctcgtgacgaagaggatatgaaagctggtaaattagtacctaatgaatttaatatccttgttacaccagaagaattaaagaaggaggctgaataatatgttagaacttatctataaaatgcagcccttagattatgtatatcttctcgtagggatcatcttatttatctttgccattcaatcatttttggataaagaacataaatatcgtattggtacaggcttattctggctcttgtacagcgtgtcctttatctttggttcttatctatcaaaggaaataaatggctggctcgttattgccatggctgctatcgtcttggtaaaacaactcggcaaaggtcattactttgaatctcctattgaattcaaaaaagacgaagcagtccgtattggtaatgttattttcgtaccggctttacttgttggtatcatcacattcatcattggcttctttactaaactaggtgctcttgtaggcattggtattgccgcaatcatcgcaatgtgtgctgctctttacatcactaagggttcatttaaccaaggtttccatgaaggtcgtcgtcttatcgatgctatcggttggactgctatcttgtcccaattattagcggccctaggctatctatttaatttggctggcgttggtaaaattatctccagtgctgtagctagtgtggtgcctgcagataatgtattcctcgtagttgtagcatactgcatcggtatggtcatcttcacaatgatcatgggtaacgcttttgcagcctttgcgatgattacaagtgctatcggtgttccaatgctcgttgtagctcatggtgcaaacccagctgctattggtgctatcgcaatgcttgctggctattgcggtaccttgatgacccctatggctgccaactttaacattgtaccggtagcgcttcttgagatgcgtgatcaatacggtgttattaaagctcaacttccaattgcattgattatgctcgtgttaaacatcctattgatgtactattttatttaagaccttgttctgtggatgaacaatcttttgaaatatccttatgaggtgttatgatgaaaactattttaattactggatttgatccatttggtggcgaacctattaatcctgcatgggaagctgtaaaaacgatggatggttatactgatggcgattacaaggtggtaactcaaatggtgccaactgtacgttatacttctgttgatactgtgaaagcagctgctgaaaaatgccaaccagactttattctatgtgtaggtcaagcagggggccgtccagatattacagtggaacgagttgctattaactgcgatgattttcgtattccagacaatgcaggtaatcaaccagaggatgagccaatcgtagctgatgggcctagtgcgtactttgctacattgcctattaaaaacatcgtcaatgcattgcatcaagcgagcattcctgcaaaagtttctaatacggctggtacgtttgtatgcaatcatttgatgtatggtgtgtgtcattatgcagcacaaaaaggtaatattaaggcgggcttcatgcacattccatatttgccatctcaagtggtggataaaccaaatcaacctagcatggctgttgaaactgtgcgtgccacattagaaaccatcgttcatgtattggctcatggtgaaagctacaaggcacaagatattaactatacaacacctcatgaataggcggtatctttaatacgtgtatcgcatgttatatagtgtgatgatgcggtgtagagaatatagagtcatatattttgtttgtgtatagatgagagtgggttatctctatgaataaaaaattagtagcaagtttagtttcttgttttgtattgggttctgtcagtgcctatgcagccaatccatttagtgatgtagagccttctagttgggcctatcaatcagtagaacaattggcatctgccggtattattaatggttatccagatgggactttcaaaggcaataaagatattacacgctatgaaatggctcaaatggtagcgaaagccatggcgaatcaagaccgcgctaatgcagaacaacaagctatgatcaatcgcttggccgatgaatttagtaatgaactcaatacattgggcgtgcgtgtagcaaaattagaagatcaagtgggtaatgtgaaggtaacaggaaactaccgcttacgctatcgtggcagccaattgaaaaatgatgcgtatgcttatggaaagcattcctcctttgattatcgggcgcgtgtgatctttaatgctaaggtcaatgataaaaccgatgccgttgttcgtgtacaaggttccggtgagctcggcaatagcaatgctaatatagctcaggtaaatcttgcttatgtagatcatcattttggtaaagacacaacattgcgcgtaggtcgtcaactctatacgcctgcactagggctcatgtatgatgacctcatcgatggggcgcgcctcatgtataaacatggtaagctagatgtatccgctagctatggttactggtggggtggtgcaggtacgtaccaaaataaggaaaacactatctctgcagctatgctagaagtgaaaggtaaacttaacaaacatgttactcttggcggtatgtatggccgattccataatggtaaattatatcaaggtcaagacattgatgcggctacaggtaaacaagttaaatcctttatcgattctccatataagaacatttggggccttaacgcgaatatgaactttaaccgttggaatgtattcggtgaatggcttacagcaccaggcatatccaattcccaagcttggatggctagtgtaggatatggtaattacaatattagtaaagctcgtacttatagcgtacgtggtcaatattactatgaagaagctaactcgcctgtcttcagtagtgcctttgcaccggcctatagcttcttcaatcaacactatgtggatactaagggcgttgctcatgtacgtaatggttttaaaggctttgtagctaatgtaaactacgtaccattccaaaatgtatccatcggtgcttactatggcttcggcaataaagacatggacggtaataaattaggtgattactggcgtacagacgtgaactttatgttctaatctcagaacgccctatacatgtgcttccaaaattagtacaggcctgtactaattcacagaaaggatatatagggttcctacaaaatagaacaggcctgttctattttgtagtaggggttgtttaaaatgtaaaaagaggctgtcattgttgacagcctcttttgctattgttgaggtatattaggatgcatgaaattgatgtatttttcgtcgagtaaacgtatgaaataagcagatcgttgttggatataggattctaaaatatctaattttgcatctgttaatatatctgatgaaatacgattaaatttaaaatttagtaatggtgttaacatggcacggtgcgaatcgtgaagatataattttgccaatgtatcaaaggagagtccccaaaaactgatatctttcacaccatttaaatcggcatattcatcgttagttatattgtagaataatgaatttccatgatcaaataaaggtgcaggacctaggatacgattgctttcattatcgatgagaacaccaaaattgttgaggtgtcgatcagtattatgaatgagtgcatcaaataccatcatatcagaaaatgggataataccgtacaagctagctatatcgtgctgtgtgtcatataacataagttcgtcacgagatatcgtttcttttagaagaccagatataggcatgtatccaacttgttccgatgtgaatagagggcacgcactaactagttggtcgtggaatgtagtgagtttatattccacatgtgctaactccatagctgctgcaatctgactagcatatacttcactgagtgcctcaagccctccattggcatagcgaggtgttgaacctttatataaataaatgacatcattttcacgatgccaacatttacggagcatgccgtttgtcgtgtattctggggttgttacaatgccttgtatatgactatcttcacctgtgaaagcgatgcctgctacagtttcgctaaatgaattgtcgtataaattaacatctgaccatgaaatagtagcatgcgctggttttacccaaaatgtatcatttagagatagaccataggtcacatctaaataccgatagggattctctgtatctgcaatggcatctaataaattttcaacaaatgcacggttatttggaatcttgcgttgtaataaccagttttttagtccttttatggtaggttgcatatttattggtaatgtcgcattatctatgattgttaaattagaaatatccatgcgaaccaatgtggttaagttgacaacgtcttcgtgcctctcgatgcgaaactgcaagagaggggtatccttgttgagtaatacatactccatgtgaatcctcctttcctttgagttttatatatgctcattatagcataagaaaaaacctttctatggatgtagttacaactcagattatctgagtttattagcttttagattggatgctataataaactcagataaagttgtttacggagagtaatgataatgtatgaaattgtaaatgaatctaatttaacaatagcatttgatatgaatacacaactatctccttttggagcctttggtatttatatcaaacaagggaatcattgttgctcagctatcattgataccggtgattggtgggggatacatagaggttataatgagcttgtcgacatgaatcaaacttgtaaaggaaaagcgagttttcgccattatctgagtaacggtggcaataaacttatatttacattagattccaaaggtggtcttaacatcaatgttgttatatgtgagtataattacgagtgtaagatgactattgaaagcttagaccaaacgtatttacccaagtttattgagtttttcaaagtttttcttgagcgagaacctaaagaaatttagtttatattgcataaatttaaaaaattattgaagtaggcatataatagctatatattttataaattagtacacacctgtaccaatttcaaagtagcttatatatgtggtttcagaattagaacaggcctgtactaattctcagaaaggggatataggggtactaaaaaaatagaacaggcctgtactaattcacagaaaggggatataggggtactaaaaaaatagaacaggcctgtactaattcacagaaaggggatataggggtactaaaaaaatagaacaggcctgtactaattcacagaaaggggatataggggtactaaaaaaatagaacaggcctgtactaattcacagaaaggatatatagggttcctacaaaatagaacaggcctgttctattttgtagaaggggatgtattcgagcccctatctcctaatgttctataatttagcaattaaaaagagtcgcaccatatgatgcgactctttttctgtacccagtttctatatacaattattttgtaacaactttaagatctacagggattttagcttctacagcttcgcctttgataactttttgagctgtatcgatagcgattttacccatttggtctggttgttgagcaatcgttgcagccaatgtgccgtcttgaacagctttgtctgcgtcagcagtaccgtcgaagcctacgatgaagattgttttgcctgcggatttagctgcttggatagcgcccaatgccatttcgtcgttatgagcgaagatagcttgtacgtctgggttagcttgcaagatatttgttgctacgttcaaaccttttgtacggtcgaagtcagcgctttgttttgctactactgttaagtctttgtcagctacgttgtggaaaccttggccgcgttcacgagttgcggaagcaccagggataccttcgatttcagctacttttgcagctttgccaactttatcaacgattagttgagctgccatttcgccgccttttacgttatcggaagcgatgtgagctactactttgcctttatcagcagagcggtcaacagtgattacaggaatgtttttagcgtttgctgcttctacagaagtagagatcgctgcagagtctacagggttgatgatcaatacggatacgccgctttcaatcaagtcggaaatatcatttgcttgttttgcaggatcattttgagcatcaacgattttaactttaagaccaagcgctttagcttgagcctcaacgccttccttcatagatacgaagaatgggttgtttaatgtggaaacagagaagccgatagtgccggattttttgtcgccgccgttatcagcgcttttaccacagcctgctacaagaccgataaccataacggccatcgccaacagtaacaatagttttttcataggaacctcctaggctttcttacggtctgcaagaacagccagtaaaataacaataccttttacaacttgttgatagaaactggaaacgtcgagaatatttaacccattgttgagggtaccaataattagggcaccaattaatgtgccaacgatatgaccacgaccaccagcaaggcttgtgccgccaagaactactgctgcgatagcgtcaagttcgtagcctgcacctgctgtaggttgtgcagagttaagacgagaagtgatgattgcaccagcgataccacagagcataccagtcaaggcatacacgaaaattttaacgcggtcaatcttgataccagcaatgtaacttaccttttcactaccacctacggcgtacgttttacggcctaaggatgtacggctcaatacgaaccagaggatgatgaaagcgaggaacattgtgatagctggaactggaaggcctgcaatatccccttggccaaagccgtggaatagaggatcttgagtaagaccggaaattgggttaccgtctgtgaatactagcgtcgcaccacggtagattgtcatggtcgccaaggtagcgataaatggagctacgcggccataggtaataacgagaccgttaataccgcccaatacaaggccggcaccggcggctaatacgatagccaatacagggtcagtaccagttacgatgaggttagccatcactgcactagagagggcaaggatggaaccaacggataagtcgataccgcctgttaagatgacgaacgtcataccaaaggcgatgatcgcattgatggatacttggcgcaacaagttacgcaagttagaaaattcaaggaaactgtcgttcatgacagagataatgataaataataggatgaggccgatgagggggcctaatttttttatatactgtagagctttgctgtccattattgtcctcctgtggctaatgtcataatcgattctggtgttgcatcgcagcggtccaagatacctgctacgcgaccttcatgaatgaccataacgcggtcgctcatgcctagcacttcaggtaactcagaggacaccatgataatggacacaccatcgttcgttaattcgttcattaaatcataaatatcacgttttgcaccgatgtcgataccgcgtgtcggttcgtccatgatgataatggatggctttttaccaacccatttcgcgataaccaccttttgttggttaccaccagatagggacgatgccggttcgtgaatagattgtgttttaacgcctagctttttagacaattcgtcagcaaaggaattgagcttgctcttatccaatacatgagaaggacaaatttcaccaagattcggcaatgtaatattggaaccaatggagaaatcgaggattaagccttcgctctttctattttctgtgatgaaagcaatgccagctttgatggcatcttcaggttttttacagttgagaacggatccgttaactgttacggtaccgccattgtgtttatctacaccaaagatggcgcgcatgatttctgtacggcccgcgcccatgagacctgctacgccgaggatttcgcctttgtgcaaggagaaggaaatttcgttgtcgaaaccttctggtttgaggttatcgacgctcatcacaacttcgcctggtgttgtagtgcgagctgggtagaactcgtcgatagaacgacctaccatgtggcgcaccacttcgtctacagaaatctcagccgttggttttgtaatgatggtgtgaccatcacgcataaccgttatagtatcgcattcgctaaatacctcttccatacggtgagagatatatacgatagccacgccgcgggctttcattttgcgcatcattttgaacaatgttgccgtttcacgctcggtgagggctgctgtcggttcgtccatgatgacaaccttggcatctaacatcaagatacgaaggatttccgtcatctgttggtgaccgacagagcaaaggcctgcttccgttgtgagcggcaattcgatgcctagttcacggcacgtattttgtgcttcttcgagcatcgcctttttatcgagcataccgaatttattgcgcttcggtctcattaaatatagattttctaacaaggttagatttggccaaatgttgagctcttggtggatgaaagctacaccgtttagctcggcctctctcgggttcgggaaggtccgctctacaccgtcgatggtgattttaccagcatctgccttgtgaatcccggtaaggatattcataagggtggacttgccggcgccgttttcgcccatcaaggcgtgaacctcgccctccttgagggtaatacttacatcgcgtagtacttggttcgtaccaaatgcctttgcaatgcctgacataacaatttccataactactcctatatgattggtgaaagtatctcttaatctattgctctagggacgatcgctgaaaatacaatcggcgcgtaagataatgttcgcatacggagatgcttcaccagttctaataatgcatttgcattgttttgttgcttctttgaaagcatcgtgactagttgtaatccattcgaaatcagcgcaagggaatgtggattccaagaaggcatgaccctttggattaaaatccttcatttccttagcaatatgaattgcttcaatcttcatatgttttgtaatgagagatacaacctgctcaaaacttggtacaccgaactctaaagcaaggtcaatcttttgaacaccttcaggtacgggtagaccacaatcagaaatacaaatcgtatctgtatgaccaagatctgcaagaaccttggcaatatgactgtttaaaataccatatcgttgcatataaattcctttcatttcaatgaatgaggctgctaaagcctcgttcattgttccttttattatatagaggtcgaaagtattcgttattaggtaaatgtttgttgaagttgactaggactttcaaagcgactttggccctgcgaaggccgaaggccgtagtcagacccggccggtggagcttttaaagtcctagtcagctccctactatttatctgataagaatgcgtcgacctcatccttcgtaggcatgccaccttgggcgcccaaacgttggatggagagggccgcagctgcattgccgtagtgcaatgcgtcggctaagcttttaccattaacgatagctgttgcgaaggcaccgttgaaagtatcgcctgcacctgttgtatctactggtttaaccttgaagccggatacggtgtggatttcgccgttgtcagcatagcctacacctttactgccaagagtaacgataatcttgttttcattagctaataatgtttcctctgtagttttgttagggtagagtgccgataattcgtgctcgtttggtgtaatataggttgctagttccaaccattcaggattgagatcagctgccggagccggatttaagaggactttcacattagcctcgtgacaacgacgaacgatgtattcgatggtgggaataggaatctcattttgcaccattacgagatctgattgctcgatagcaggccaagcattatcgactacagactggtctaccttagcattagcaccagcgatgacaataatgctattgtcgccttcagctaacgtgatatgagcagtacctgttgtcgtatctgggacagtgacgatatagtccgtattgatatgattttctttgaggttatccaaaatcatttgtccatatgcatcttgaccgatgcagcctaccatggtaacctctgcgcctaggcgagcggcagcaaccgcttggttggcacctttgccaccgtgagcgatgtgcaattcgttgcccataattgtttcgcctgctgcgggacgtttatccgcgaggaccacaatatccatgttgcaactacctataacaacaatgcgattcatgatatctccttacctgtttattagtgtatcttaattctgttattagtatagcgtaaataacgttgtttatctacataaataaccataaattatgggaataaaaaatcggtatacattttcttgagagagaaatgtataccgaaggtatttggtggttttataaaccattaaggatattaatattaggttagtctaattgatgtatcattttatcaatacgattaaaagtttcctctatagttgttgtacgtccttgaatgatatcattttgtccttccactagagcggttaatatttctaactgggcttttaatttattatatgttttactttctagggtgattgtatcatttgaatttcccatagatatctcctaatatatggtagtttataaaaacgatggtttatcgtagtgtgtacccggttcacccacaccaatgctggcacggctgaatggcgtttcgtcttcaacgtgtaggatatcatacacggcttttaccacagcttctcgtgtaacttgtgcgtcgttgaatggagcgccttctgcgataaattcataatttgtgttctccatattgttatagagccaagataaacgcaaaatagtgtagtttaggttagattctcgtaaaacgttgcgcgcttgacgttcgccttgtacatagctaattggtagattatcgaaggtccatttttctaaggcttttggaaattcaccagatagaccggccatggataagccgatgatacgacgaatgttttggcgagcaagtgctttcacaatagctgccatatcactgcccgtctccatagcactaaggaatacgacttctgtattcttaacggcttcctctaattttttaggattttgaaaggatccttcgataacggttattcgttcgtgttctaaaatttccggatgaatgcgtgtgctcaattgacgtccatataaagtaatgtgcatatctgtatatgttaataacgtcgccgttaagcgttgtgcaatttggcctgcagcgcctaagattgtaatatatttgtacatgtagacctcctgtgtgggcgtaattaatatatgcattatatcataactatgtgacgaggaagtgagaatggtatgtatagtgaggttacaatttattcgtttatataatgctgtaaaatttattgttgaatttacatgataatttaactacaataataataagacatttgaaaaatgagtgttatattactaaagtttcttggaggtgatagtatgccgaatataaaacctatttcagatttacgtaattattctgaagtattgcgtgatgttgctatagatagtcccgtattcttaactaaaaatggtagaggtcgatatgcaattatggatattcaagactatgaacgtgtaatggctactataaaacttatgggcgctttagagaccggtcgcaaatctggtgaagaacaagggtggatttcatcagagcaactaaagagtgaattggggatttaactatggatcatcaaattagttatgcacctaaagcacgagaagatttgcttaaaataaaatcctttatagaagaagaaaccggggatattgagttagctaagaaaactatttcggatatagtgactacgaatgattctttaagagcttttccagaaatgggacagcgattattgataaacatgggaagtaaaattgaatatagatatttgctttgtcataattatttaagtttttaccgttatttagatcggactatttatattgatagaatattaaatagtagacgtgattatcttaaaatactattggatgaagtacattagtttttaaaggcaccatcattaatagatagtgctataaaatgattttaatagtaacatgaagatgcgcgaacactctttataatttgaatgcattgtgatttaatgatataaaggtaagattttatttaattttaatctgtaattgaaagagagaaggcattcattacaaaattatttggagggaactaacatgaagtttttagatcaattaggagatgctgtaaaggatgtaaaagaattagctaagtctaaagctagtgttgtaaaagatttaactgctgatgctgcacaagaagtaaagatattggctaaagaaaaagcaaaagatgtgaaggctaaatccgctgatgcggcgcaagaagtaaaggtattagttaaagaaaaaacggcagatgttaaagctaaatctgctgatgcagcatatgaggtaaatgaattggtaaaagcaaagtctgcagacgttgcaaaagatttagaagctacccttaaggtaaaggctgaagagctaaaacaaaaggctagagaagtaaaagatataactgctgatgctgctaaagatattacagaaactgttaaagaaaaatccgcaggggcagccaaagaaattagagaaaaagttgctgaaacaacagaagctaaagaaaaggctgaagtttcgagtgaagcagtagcaacagagcgtggagaaaagactgaatagaattttagattgaataaatctaatctacatttatatatacgtattgacttatactgttttaatttgtaatagtattgtacatagaaaaatcctatatggtttcaagcggcggcatcgtttattcggtgtcgctttattttttacaagttatatttcaattggaaaaggattcggcgtactttagagtaatggtataatacacataacaactagtataacttgaggtggcatatggataaacagcaattagcaaataaaatttgggaatcagccaacaaattacgctctaaaatcgaggcaaatgaatataaagattatatattaggattcatgttttataagtttttgtctcaaaaagaagaagagttactacgtacacagtatcaaatagcaaaagctgaatacaaatctgttttagtagaatcaaatgtagaattacgtgatgctattcgaaatgatttgtactactttataccatataatcatttattttctacatggattcaggatggtaatcagcttgatgtaggtagagtgcaagatgcattaaattcttttgaacgcttattgaatgatcaatataaccgaatatataaaggtatctttgatacattgcaattaggtttaactaagttaggcgataactctggtgctcaatccaaagctattcaacaattaatctcattgattgatgaaataccaatggatggctctcaggattatgatgtcttgggatttgtatatgaatatttgatttcgaattttgctgctaatgcaggtaaaaaagcgggtgaattctatacgcctcatgaagtttctgttttgatgtcagaaattgtagctcatcatttacaaggtagaaatgaaatttcaatttatgaccctacaagtggatcaggttccttgttgattaatattggtaaaagtattgcaaaatacagaaaagacaaaaatactattaaatactatgcgcaagagctaaaagaagcgacgtataacttgacaagaatgaatctaattatgcgtaatatcaaaccatctaatatcgtggttagaaacgcagatacattagaagatgattggccttattttgatgaagcagatcctcaacaaacgtataatcctctatatcttgatgctgttgtatctaatcctccatattctcaacactgggaaccaaaaggaaaagaaaatgaccctagatatagtcggtttggattagcacctgcaactaaggctgattatgcttttttacttcatgatttatatcatttacgtccaaatggtattatgacaatcgtactgccacatggtgtattgttccgtggggatagtgaaggacaaattcgtaaggctcttattgataataatcatatcgatgccatcattggtttaccagcgaatattttctttggtacaagtatcccaacaatcattatggtattacgtcagaagagagacaatcaggatgtacttgttattgatgcttcagaatattttgtgaaagtcaataaaaataacaagttacaggcatcagatattcgtcgcattgtagatgcttattgtaaaagagaaacgactcctagatattgtacagtcgtatctcgcgatgagattatacgcaatgattacaatttaaatattccacgctatgtggatacatctaagcatgatgacatatatgatatatatggtattgttcatggtggaattccatatagtgagatagaaagattatctccgtattggaatgtatttgaaggacttgatacagaaatctttaaacaaggtcaagatggatactattcattggtagagggagtggccaagattgtgcatgattatcctactgtaaatgaatttacagattctttagtttcaaagattgatcattatatagaacatgttgctaaggcagttattgatgattttaatgttggaatggatgaaactatttggcacacattgtcagaagagttatttgaacaattttctaatacaccattaatcgatgcatatgatatttaccaaattatgagtgacaagtggtcaacgattgaattagatatcgataaaatggggcataacggtaagtccttggtcgcttctgtagaacctaatatggtaatgaaaaagaaaaataataaacaagtagaggttcaagaagggtggaaaggcgctattgttccttttgaattagttcaagaattatatttgcagaatgaactttcaaaagtaacacatatagacaatgaacttgaagcgattaaagagcaaatcgctgaacttgctgaagctgtaccaatggattatcaagatatggaatttctgaatgatgatagaaatggtttcgtgaagacgccgttgaacgctgctgttaagatttacaaggatgaaccagaattatatccattattaaaggccgttaaagatttatatgctgaagaaacaaaactaaaaaaacgtcagaaagaggccgtagctgagttagcagatgctacaaaatatcgtatagaaaatcttactgatgaacaaatagatgaattgttatatcaacattggattatgccagccataaatgaactaaatgcgtattcaaaaaaggttatcaatgattttgttcaatgtttaagtgcgttagcaaataaatatggaacttcattacagtcaattgataatgatattagagttgtagaacaagagttgattacatcattacatgagttagaagctaatgacgatatggggatatccgccttattagaattgttaggagcaaaatgatgaatactaataaaaaaactcctaagttacgatttaaaggctttagtgatgattgggaacagtgtaagctagatgatattgccaaaataaaaactggtggaggaactcctaaaacagctaagcctgaatattggagtggtaatataccttggatacagtcatcagatttagttgaaggtgatattacacatgttaatataaataaatttattaacaataatgcgttaaagaattcagcagctaaattgatttctcgtgattcaattgctttggttacgagagtgggtgttggtaaagttgcagtaataaatcaagattttactactagtcaagattttttgtctttgagtgattttgatagaagtgatattaaatttcttgcatatcaactatatcgattaatgcaagaaaatgccaaagtacttcaaggaacatcaataaaagggattacaaaaactgaattaattgagcaaagtatatcgatacctaactcgggccaagaacaacacctgatttccaatgtattatcaaaaatagatagtattattacccttcatcagtgtaagcttgaaaagctaaaattaacgaaaaaagctttattacaaaaattatttcctaaaaatggaaaacgtattcctgaaatcagatttaaaggttttactgatgcttgggaacagcgtaatttagagtctctatttacaaaatatgaggataaagtaaaaacaccgaactctggatattggcgattaggattaagaagtcattgtaagggaacctttcacacttatgtagatgctggtaatgaacttgaaaccgcagagatgaatagggtgcaatctggtaattttatactaaatattacatttgcttgggaacgtgctcttgcagtaacaaatgaagaagatcaagataaattagtttctcatagattccctcagttcaaacctaatagcgatttagcaattgatttctttaaacatactttaatagataaaaggtttaaacatcatctagaattatcatcaccaggtggtgctggtcgaaataaagttttaaaaattgctgatatgctaaaatatgaacttttagttcctagtattaaagaacaaaatgaaattagcagtttcttgaataatgttgattatattattaccctttatcagcgtaagctggatcgtcttatatcaataaagaaagctttacttcaacagttatttgtgtagatgtaatagattaggtgaaatatgatttttacaaaagaagctgattttgaatcagcccttattcagcaattatctaatcatggatgggaagcagagtgtattgaatatcctacagaagaggctctagtaaagaattgggcggatattatttacaaaaataactgctcccctgataaactggataaatatccgttgactgaaagtgagatgaatcaaatcttaatgcaaattaagatgttgaaaagtcctgccatgataaatgattggataaatggcaaagttgttactattaaacgtgataatccagatgatatgatgcatttgggaaaaaatgtatcacttaaaatttttgatcgtaatgaaatcgcttctggtcaaagtgtttatcaaatagtgcgtcaacctcaatttaaaagtcttaatgatgtttctagagatagacgtggagacgtcatgttactaattaatggaatgcctgttattcatattgaattgaaacgttcaggcgttccggttgatttcgcaattaatcaaatcgatttatataatcgtcgaggtatgttctcagggttattttccttaatacaaatttttgtagctatgaccccagaagaaacggtatattttgctaatccaggaaatggagaaactttaaaatcagaatttcaatttcattgggctgatgtaaacaatgaaataataggtgattggactcaaattgcaggaacgttattagcaattcctttggcgcatgaattattagggttttatacaattccagatagttctgacggtgttctgaaagtaatgcgtagctatcagtattatgcagctagtcgtattgcagatatagttagtaaagctgattggggatataccagtcccttaggtggatatatttggcatacaacaggatcaggtaaaacgatgacatcgtttaaaacagcgcagattattgcgagtgtaggcgatgctgataaaatcgtatttcttgtggatcgtgttgaattaggaacacagtctttgcaggcatatcaaggttttgccgactctgccacatctgtagaaggcacggaaagtggtactgtattactggaaaaactagatagcattgaaccaaaggatatgataattgtttcttctattcaaaagatgaatcaattatctaaagatgatacacgcgatgacatgttaaaccgtgttaagggaaaacggttggtttttatttttgatgaatgtcatcgtaatacctttggcgatatgttgcgagcgattaaggacacattccctcatgccttattatttggttttacaggtacgccaatttttaaagataatgcaaagaaaaccttagcgactgccgatttatttggtgatgaattgcatcggtatagtatttctgatggtattcgagataaaaatgtgttaggttttgatattacatcagtgccaacatatactgatgacgatttacgtaatgccgttgcattacgtgaggttggtgcaaataccattagtgatgttatggaatctccagaaaaacgagaaaggtattaccattttatacatgatgtacctatggttcgagattatgacagtggatatacgagaggtattgaggattatatagaaaatgggcattatgataatgatgcccatcgtgtagccgtaattgaagatattaacaataaatggttagtacaaagctataaaggattgttccacggtattttagcaacccatagtatatctgaagccatctcttattatcgattgtttagacgttgtgcacctaatttaaaagtagtagccttatttgatccaaccgtagatggtgaaatggatcctacaactgccgttattaaagatgaggcattggaagaaatcttagcagattataatacatattttaatcagaattttacattaccaaattatgcttcatttaaacgagatgtttgtgctaggcttgcacataaactgcaatatcgttctaatgatgtagcgattgatacaaatcaatatattgatattgtaattgttgttaaacaattattaacaggatttgattcaaaatatgtaaatacactatatgttgataaaattatggcttatgaagagatagtacaagctttctctcgtacaaatcgtttatatggaccgcaaaagccatttggtagtattagatattatcgcaagatacatactatgtctcgtaatattcaagatgctttcagattatattctggagctgtgcctgaaggattgtatgcagataaaaaagatcagaatattcgcaaaatgaatgttatagtcgaggatatttcagatttatttatagcagaaggtatagaatactattcaaaactaccagataacatagcgagtcggcataaatttggatgcttattctatcaattacgtatattaatggaagctattcggctacagatgtttacgtggcaaaagaatattgatgaaaaactaggactaaatttagatgaggaaacgtataatacattagcagctcgatatggagagttgtttagttctagtacatccgatggtaaaactaatccattgattccttttaatttaactgccaaagctcataagcaggagtcgattcgtattgatgctgactatatgaataaaaactttgaaaagtatatcagagcatataatattgatgactttgataggaatttaattgatcaattaagaatgatgcttcataaaagttttgctcaactatctcaagaggaacaacgtgctgctagacaaattttggtagatatagagcataagcggttagtatttgacgagaataagacattgactgattatatcaatgaatatatgaatgtcgattggaatgcaaagatacagtattgtattaatttgttgggtgtcgatgaagctaagttgagagctttgttaaatgtacatgttaatgaagctaacattgatgaatatggacgctttaatgagttaatttctactgtagacatcgagcgagctaaacaaaatttaggaatggtagagcaacctcattggaaatgtattattaaaattaaaaatacacttagagagtttgttatttataataagcttgatggatataaatcgtaaatttgctttacagtctattataaaaatagcaggattatccccctgctattttttgttatgttctaaactttcacaatacccatataaatgttaaaatagacagtatatattctattgaagaaaagaggctattatggaacggataaaggatctcgtgtacacccatgatcagggtggacagtttagatgggtaacggtgagcaccttaatgcttgcgttgggtacaattttgcacttggtgagccctagttttgcaggaattacaccaaactggatgattgcagcgtattgcgtagcgattttgctgacaaagccaagtgtttctcaaacactaggaattggtttagtggcggccttgattgaggtgttgacatcaaaatctggtttcccatatggtaacttgatttcagaacctgctggtgcattgatggtaacgcttattgctcgcactatggctactatgaaaattagcaaaattggttctttcgaaattacgccaatcgtaacagcttttttaagtactgttgtatctggtggtatttttattactcttttgtggcaaattgcaggcttgcctaacaatgtatatctctttgtgatttggccagccgtactcgccgtagctgctgttaatgcggctattacaccgattttatatattccagctcaaaagatgtttgctaaacgcggtatgttgcctaccggtaatgcagaatctagtaatcatagtcatttggtgatcaatcctgaacgagaagcgaagatttccattgagcatttgaactattaccatcctaaggcgactgcgcctacgttaaagaacatcaacctcgatgtgcatgatggtgatttcctcgttgtaacaggtcctgccggttgtggtaaaagtacgctttgtatggccatggttggggcggtgccaaaattctatggtggtcgtctagaaggtatggtattcgtagatggtaaggctacaacgcaattatcgattcctgagttagcaaatcatgttggcgttgttcttgccgattatgatacacaactcgtaacgatgacggttcgcgaagaagtagcctttgccatggaaaaccgtggttacgatcgagcaaccatcgatgctcgttgtgcagaggtgtttaaacaagttggtattgaaggccttgaagaccgtaaaattacgagcttgtccggcggtcaacgtcaacggttagcgattgcttccgtgctggcaaccaatccatctgtcctcgttctcgatgaaccaactagttcacttgaccctgatggaacagccgaactatatcgccttgttggtgatttgaaccgcaatcatggtatcactgttgtggttatcgaccatgatttgcatgctgtattgccatatgctaaccgcatggcgcttatggtggacggtgaaatcgtatgtgatagcgatgtggctacaacattggaatatatgtataaccatgatatttatgtagaagcattgccatccgtatttacaacgtatatggaattggaaaaggccggttaccatagtgatgaaccttggcttagcatcgaatcagctattaagggccttcatcacatcgaaatggctaaggccatcgatcgttctcgttatgaacatataaatgtaaatggtgaaagccaagttcaacatggtaatcgtgtaggtgaaagtacaggaggtggcgcacatgcttaaggtagaaaacttacgatttggctatgtgcctaccgtagatatttttagaaatgtaaactttaccattcgtaaaggcgaatttattgctgtgggtggtaagaatggttgtggtaaaacgacgattacccgtctcttagtaggccttgaaaaggctagcgaaggttatattcgttataatggcaaggatattacatccatgccaccatctaaacgaggccaatttattggctatgtgttccaacaaccagatcgccaaatgtttagacctactgtggctacagaggtagcgtttggtcctgaatccttgggacgttctaaagatgagattacacacattgtagacgaagtattagatcgctgtggtattagtcatttgcgcaacgagtatccacctacattgcgccgtggcgaaaaacaacgtgttgccattgcatctgcattggctatgcagtctaaaatcctcatcctcgatgaacctacaagtggtcaagatgggaaggaaacaaaagaattactcgccttgctccgtcagttgaatggcgaaggcattacgattttattgattactcatgacatggaaatcatggcttctgaatgttctcgtgccatcatcatgggtcatcgcaccgtatcctttgacggtataccagaagaattattttcgaaatctaccgatgaattacatgatctgggtctcacaaaaccgccaagtgtagagctttcacaagcggtaccaggattaggctactgcaaatcgatggatgaattacggacgcgccttatcgcgcaattggcagaataggaggggaccatggaacgattagtaccattaacaaaaattttgatgaccctcgccgtatccgtatgggccattttcttaagagactggatgtcattgatggcattggttgttgtagaattagtagcgctcttgttgaccggcttattatggaaacaatacaaggccgtatttgctttaatcgtattcgccatattcttaggcattgttcaatacttaggtagtggagacgttgtatctgctgttgtatccggccttcgcatgttagccatgacactcgtatttattgcactcttggcaacgacgaagttacaagatttaacagcggccctcgtaacacaatgtaaaattccttatgaatatgcatttatgtttactgcagctcttcgctttgtacctgattttattggtgaaagcaaggctgtacaagaggcgcaatcctgccgaggtctttctttagaaggcaatatctttaaacgcatgaaatcctatggttctgttatccaaccattacttctaaaatccttaggccgttctgaaactatggcattatccttggaactaagaggttttggtggcaagacacatagctttgccgcatccgtaggccttaaactattagactatatagtcattgttgcgttagttgtagttacgcttattctatttggagtattatagagatataattgactatcttctattactagtcagtgttatatatttatgatatactacaaataggtagtaaagcgtacaaaattacctacaatataacaaaaaaggacgagttgcagctcgtcctttttcttgcttatttttttgtcttattgttgagccaattgttataggtagttacaactaaggttatttttataaactgttttagaggaatatatgagtgaattaataattcgatcaattgcaaaagatgatgtgtttgcttgtttaactatttacaactacgaggtcgaacacggcgtagctactttagacctcgaaccacgcacattagaagagtggcgtgaatggtataacgcgcacagcgatgagcatcatcctatcattgtaggcaccattgatgatgtggtggtaggctatgcatcgctttcaccatatcgattaaaggatgctttcaaaagtactgtagaattatctatttatattcaccaagattaccgtggccaaggtgtggcaacgcggctgatggaacgtattttggagatggccaaagcggatacgatgattcataatgtagtatctgttattacggcaggcaatgaagaaagcacgaaattacacaatcgattcggctttacctattgtgggcttacccctgaagttggttttaaacatggaaaatatcaggataccgaaacttacgcattattggtataataatagatattaaatcattcatatattcgtggggttgcggattatatgttacgcatagacaggggttaagtaagttatgataaatatgaaagcagaacggcaattcataggcaatagtacgtatcgtagccgattggtagatggtcattttcatactgaattatgtccacatggtagcggtgatagaacggcattgatgattgaaaaagccattgaattacgcatcgaaaaggtgtgtttaacagagcatgctccgttaccaaaggcctttgaggctgagtatggcggtgataagattgcctatgatacggcgtcacttaaactcaatcaagtggattcttatcttgaattgggacgtgagttacaacgtgcctatggtacgcatatcgatatttcccttggctttgaggtggattatatccctgattttgaaagcgacattcaagactttcttgatcgctatggtccattgacggacgataatattctatctgttcactttatggatggcgtaggtggcaaatactactgtgttgactataatacagaggaatttgaaaagggctttggtccttggatttctaatcaaagtgaattgtactataaatactttagtatcattcgccaagcggtgcgtgctgatttgggtgcctatacgccaaaacgaattggtcattttgatttaatcaagaaataccaacaccatttcggttttgaacaccatttagataaacgaaatgctcaattagtgagcgatatattacatattatgcgcgttcaaggtagagagctagattataatatgagtggattttttaaacctgattgcggtgaaatgtatccaagccgttttattcaagggatagctgccattattggtgtaccctttgtgctaggatctgatgcgcatagcgtagcagatgtagcaaaggtttgggactagatataatactcctctattgacaattctatagaggagtattattatagttttatgctttaatacgctaaagtgataaaatctaaaagaatctatatattttaaatagaaatattagcatggtttatagaaaggatgatcctcatggtacagaaacagttgcctacaggttttcgtgatgatataggggctgtagcggagcgcaaggatgatgtgagccagtatttgctcagcctttgccgcaatcgtcagtatacaaaaatttctacaccccttgtagaatacaaagatgtgtttaatggttatacattaggccgtggtcaacatatgtacgaattctttggtagttctgatgcatctgtggttatccgtcccgatttaaccatgccaatcggtcgtttcttggcgactacgaatattgaattgcctcgcaagttctactatcttggcgatgtgttgatgaaaaacaaacagcatcgcggcgatattaaccaagttacacaaggtggtatcgaaatggtcggctatgaaggtattgatgccgagctagaatgctttgccatcattaaagaggtaaatgaatcacagctcaataataccttattattagaaattggtgatgctcgtttctcccgtgctatcaccgatgcattgggcttgaccgatggggaaagggcagatttgctcgatgcgttatttacaaaatatttgccacgctataacgaattgattagcgaatttaaaaataatgcattgtatccattccttacgatttggcctcgcttattcggcactgtaaatgatattaaaaatgagcttagtcaagtcattttgcctgcaggggcacaacgtattttagatagccttatggatctagcgggacaaattgaagcgactggccaacaagttcgcattgatgtgtctacagaaccacttcaatcctattacacaggccttacctttagaggttatgtagatggcgtatcgcaatacatcgtcagcggtggtcgctatgatggtctcttatctggatttgatggcacaccgatgccatccgttggtatggctttcaacatcgatgtccttacagatgtgcttatgcaaggtgaaagcaacattcaagataatggtaaattgcgaatcgccttgacaaaggggcgcgttgaaaaggatttcattccactcttagagtcctgtggtattgactgcgaaccattacgcaacaaagcgcgcaagttgattatcccattgggagattcggtagaggttatcttagcgaagggccctgatgtaacgacatatttgaataatggtgtcgttgatttaggcatcgttggtagtgatgtactggatgaacaagacaatacatcttatgaaatgctagatttgaaaacgggccaatgccaatttatcttggcctccttagaagggtataatccgaaggaaggccgtcgtcaacggattggtacaaaatatccaaccattacaaaacaatatttcggatcccaagacgtagaaatcatcaaaatcgaaggttccgttgaattggccccccttgtaggtctggctgatgctatcgtagatattacggaaacgggtacaacactacgagaaaataatcttaaaatctatgattggctccaaccaatttcgacccgtcttgtggcgaacccactagcgttaaaacaaaaaagaaataccatctttgcgttgattgaccaattacaatcggctattgataaaaaatagattgcctatgctattgcgatgtgatgagaaacgtttacaatagaagtattgatatacatagtttgaaatgaggatatacaatgaaaatttacaaagaatctcttgatgcaatgcttagcattgtccgccaatatacacaacaaacaacagatatggaaattgaacgccgcgtgtacgatattatcgaaaacgtgcgtgctaatggcgatgcagcactccgtgaatattctgaaaaattcgatggcgtaaagcttgatgattttaaggtggatcaatctatcatcgatgcggcatgggacaatttaccagaagacttgaaacacgctttattggtagcgaagaaaaatataaccgaatttcatagccgtgaaattgaacaaggctttgtcgatatggatacaccaggcattacacgtggtcaaaaggtaacgccattggctcgtgttggtctctatgttccaggtggcacagcggcatatccatctaccattatgatgactgcattacctgcaaaaatcgctggtgttaaggaaattatcatggtaacacctcctcaaaaggatggcattaatcctgctgtgctaggcgctgcaaaacttgctggtgttgatgcggtataccaagtgggtggtgctcaaggtgttgcggctcttgcgtatggtactgaacaaattccaaaggtagataaaatcgtaggtcctggtaacatttatgtggccactgccaagcgccaagtatttggtcaagttgatatcgacatgattgcaggtcctagtgaaatcggtgtcatcgctgatgaaagtgctaatccagtacatcttgctgcggacttattgtcccaagcagaacatgatccacgagctcgtgccatcatggttaccaatagtgaaaaactagctaacctcgtatctgatgaggtagaacgccaactttcacaattacctcgtgaaagcattgctcgtccagctatcgaaaacaatagctatattgctgttatggatagcgtagaagatatgtttaccgtgatgaacgaagtagcaccagaacatttggaaattcaattaccggaccctatggaatatatgagcatggtagaaaatgcgggctccgtattccttggcagatatgcctctgagccattgggcgactatgtaggcggtacaaatcacgtattacctacgagtggtactgcaaaattctcgtccccacttggtgtgtacgatttcgtaaaacgcatttcctttactcaatttagccgtgaacgcttacaagaggtggcgaaggatattactactttggctcgtacagaaggtcttgaagcacatgctcgtgctattgaagtgcgctttgaaaaataattgtatggatgggaacgccttaaagggcttccttaatgataagaggatactatgatgagaacaaatcggtcagctacggtaactcgtaaaacgggcgaaacagatattacaattacacttaccctagatggaaatcaagatattcacgttgatacaggcatcggtttccttgatcatatgctccgtttgttggctaagcatggccgttttggccttgctgtaaaagccctaggtgatacgtacgtggatgcgcatcatacggtagaggatattgcattgaccttagggcaagcattgacacaggctctaggtgacaaggcgggtatcgagcgttatggcgatgcgtgggtgcctatggatgaagcgttgacacaggttgttatcgaccttagtggccgtccatacctcgtgtttaatggtgagtttatgactcctgtattgggtggtaattttgaaacagaattggtagaggatttcttccaagccttggctgtgagtggtgccatgaatttacatgtgcgcaatgaatatggtcgtaatacgcatcatattattgaaagtatgtttaaggccactggtcgcgcattgcgtaaggcggttacgattaacccagacattcatggtgtgaattctacaaagggcatgatttaatcgagtccttgtgaatggtgaaagcagggcctcataaggctcgtgaatagaggagatactatgatttttccagctatagatttacaagatggtcgcagtgtacgcctgtataagggcgattttgcaaaggaaaccatcatcaatccggatccggttgaccaagcatctcagtacgaggctgctggcgttggcgctttgcacctcgtcgacttagatggggcaaaggcggggaaaccagttaatgtggatatcgttaaacgcgtgcgtgctgcatttacaggtgtgttagaaatcggtggcggtattcgcgataaagcggctgtagatttatatttagaaatgggcgttaatcgcgttattcttggctccgtagcccttaagaatcctgaattgacgaaacaggttatcaccgaatacggcccagaacgcatcgtcatcggtgtagatggtaagaatggtaaggttgctgcggaaggttggctcgaccaatctgatgtgcctatgaccgaccttatcggtgctatggtagcagcaggtgcaaagtattttattgttaccgatgtggaccgagatgggacaatgcaaggggctaatgaagaactattgggttccttacaagatcaattccctacggcgcgtattgttgcatccggtggtgttcgcaatttagaggatattaagaatcttgaaaaacgcggtgttgtagacagcattgtaggtaaggccctatatgaaggcactattacattagaagaaattgctgcgtttaataaggagaatgcatcatgttagcaaaacggattattccttgtttagacgtagataatggttgcgtaaaaaaaggtgttaactttgtaaacctcgttgatgtaggtagtcctgtcgatattgcagctacctatgaggaacagggcgcagatgagctcgtattcctcgatattacggctacagtagaccgacgtacgacgatgcgcgatgtggtgacagatatttcaaaacatgtgttcatgcccctcaccgtaggtggtggtattaaaacagtggacgatatgagcgcattgctaaaagctggcgccgataaggtatcgctgaattcagcggctttagcgcacccagaactcatcagtgaaggcgctcaaaagtttggtaatcaatgtatggtggtagctattgacgtaaaaacggatccagagactggtaaatggtatgtgtatacccatggcggtcgtaagcgtagcgattgggaagccctagcgtgggctaaagaagcggtgaaccgtggcgctggtgagttattggtgacaagcatggataaggatggcaccaaatccggctttgatattaaactatataaggccttggaagaggtcgtagatgtaccgattatcgcctccggtggagctggtacggtacagcattttatcgatgtttttaccgaaaccggcgttacgggtgcattagcagcatctatattccattttggtgaaatcagcattcccgatttgaaatcacaattgaaagcagcgggcattgctgttagatagggtaggagattgtagcatacatgaaaccagactttaataaaggtggcggcctgttaccgacggtcgttcaagacaatacaacaaaagcagtgctcatggtggcgtggatgaacgaagaaagctttcacaaaacactagaaaccaaggaaacttggttttggtctcgctcgcgccaagaactatggcataagggtggtacaagtggcaatgtacaacacgtggtagatatgaagctcgattgcgatggcgatacattactggttctcgtcaatgcagaaggtcctgcgtgccatacgggagcggtgagttgcttttttaacgatgtagaagcgtagagaaatacgaaatatgaggtgagatgacgcgtaggcgttagctttcacaaaggagaagaacaatggccaatcaacaaacattagaagaattatatgccattattaaggggcgcaaggaaacaccaaaggaaggatcctatacgaattacttgttcgataaggggctcgataaaatcttgaaaaaggtaggcgaagaagcaacagaagttgtcatcgccgctaagaacgaagattctcgagaactagtatatgaaacagcagacgtactctatcatttgctcgtgctattggtagaaaaaggcgttccttatgaagccatcttagaagagttggcaagccgtgaaggcgtcatcagcaaaacacaggaacgcaaagcgattacagatttgtaaggagtagagtatgaagaaaattattggccaattaaagccctatgtgccagaggaaccggcggaatccgtcaaagctcgcctcggtgtggagcgccttgtgcgattatcagccaatgaaaatccttatggtacatcgccaaaggtgcgcgaagcagtattagattatgtgacgaacaatgatgccaatctataccctgatggtaatgcatcatccttgcgaagcgtcctagcggattattggaaggtagcggaaaatcaacttgttattggcgtcggtcttgatgaagtgatttccatggtaaataaaacatttatcaatgctggggattctatcgttatcagcgttcctgccttttctgaatatggccttaacggtcttgtagaaggggcggtcattcgcgaggtgccatgcatcgagtctacaggtcaatacgattttaaggcgatgcgccaagctgtagatgatacgacgcgcctcgtatggatttgtaatcctaacaacccaacaggaacctatgaatctgttgaagatatccgtaactttattagtacattgccgaaagatgttttagttatcatcgatgaggcgtatatcgatttcgtaaccttcgtagaggtgccaacagcacgagcattgctggatgaattccctaatgtgtttatcatgcgtacattctcaaaggcctatggccttgcgaactaccgtgttggctatatgatgagtagtgttgaattagcgaactatattcaaaccattcgcttgccatataatttgaataccttgtcccaagtggctgctgaggctgcctttggcgatcgtgaattcttgcgcagtactgtagagaagaatgctgcagaacgcgtcttatgggaacaaacgttagatgaagtgggcggcacttattataagagcggagctaattttatctttatgtccgtacctaatgcagatggccttgctgatgaatggctcgctaagggctatcaagtgcgccgtgggcaacgggataattggttgcgtgtaactttgcctcctgctagtgatggtgctattatgcgcgctattttgaaagagtatatggcccgtcaataatgtaggccacttatatagcgatgtacattgcgacgtatattgctatttatataggcgtaaaagaaaggatgtcactatgattgccataattgattatgatgcgggcaatacatttaatgtacaaaaagcattacaacatatcggtcttgatgcggtattgaccgctgatcgagataccatattggctgctgatggtgtgattctaccgggtgtcggcgcctatgcatcggctgtttccgtccttcgtgagcgcggtcttatcgatgttattcatgaggtggtggagcgcaacatacccttgcttggtatttgtttagggatgcagcttttgtttgatgaatctgaagagtatggaccgactcccggattaggtattataccgggcactgtgaaagccattcctaataacctcggccttcgtgtacctcatatggggtggaatcaaaatacactatgtcgtaaagacagtgctttttctgatgtatctgataaatatacatattttgtgcactcttattacgtggataccgattctcaatatattacaacaactgcagactatgggattaaggtatcgggcattgttgagaaggggaatgtctatggcatgcagtttcatcctgagaaaagcggagctgtagggcttaatctgctacgaacctttggaaatatcatagtaaaaaaataaaatagtcttcgatatatgcttttaacgaataatgagtatctagaatgagaaagtgtaaattgacatatttttgtttagatatacaatgagtatgtaagtactcatcaatttataagctaaagtggcattggagacctaattttattagaaatgtttattcggcacctccgatgtcacgtacattggaggtgtttttatggttatgaatggtatttacttagttatagcctccgcgtgtattctaattttagcgtaccgcttttatggggctttcatagcggccaaggtgctgacacttgatcagtatcgtccaacgccggctatggtccacaatgatggtcacgattacgtgccaacaaacaaatgggtaacatttggtcatcactttgcagcgattgctggtgcaggtcctcttgtaggtcctgttatcgcagctcaattcgggtatttgcctggcgcattatggattctcattggttccgtactcgccggtgctgtgcatgacatggttatcttatttgcgtccgttcgttatgatggcaaatccatcgcggatattgcccgcgaagaaatcagtaaatttgctggtttcggtgctatgcttgctacattgttcctattgattatcacacttgctggtatggccgtagtagtagccaacgcattgcataactccccttggggtttcttctccgtatttgctacgattccaatcgctattttcattggtatttatttgaaatggttgcgtcctggtaaaattcaagaagcaactgttattggtgtagcattgatcttcgcagctatcatctacggtccaaacgtagcggctagcgaatatgcttcttggtttacatatgacttgcaaaccatcgaaatcatgcttgcagtctatggcttctttgcagcagcattgccagtatggttattgcttgctcctcgtgactacttgtccacataccttaaaatcggtacaatcggcgcattggctcttggtattatcatcgtaatgcctgaaattcaaatgccagctgttaccccttacatctggggcggcggtcctgtattgaaaggttctgtattcccttacatcttcattactatcgcatgtggtgcgttatctggtttccatacagtaattgctacaggtacaacacctaaaatgcttactaatgaaagagaaatcttacctatcggttatggtgcgatgttaacagaaggcttcatcgctatgatggcgttgattgcagccactgcattacatccagacgattactttgctattaactccacagtagaatcctttaaagcgctcggccttcaagttcatgaattaccagcattgtctgcaatggttggtgaagacttgatgcaccgtcctggtggcgctgtatcccttgcagtaggtatggctcatatcttctccaaattgcctaatatggatcacttgttgggttactggtatcacttctgtatcatgttcgaagccttgtttatcatgactttgatcgatgctggtactcgcgtaggtcgttatttgcttcaagaactattaggtcatttccatcctaaattcaacgaccaacactgggctcctggcgtatatggttgtgcagctttgatttgtattttgtggggctatctagttctacaaggtaacatcggtattatctggcctctattcggcgtatctaaccaattattaggtactatgacattggccgtaagtactaccgttattatgcgacttggccgcaaacgttatgcatgggttacaggtattccttgtattctaatggctatcgtggctatcgctgcagactttgaaaacgtatttaacagctacattcctgctggtaaatggatcctagtagcgttcagtgctgctatgttcctcatgatcctcattgtattggtagaggctgtacgcagctggattcgcttgtctagcatgcctcaagactaccgtacacaagctgaaattgaagctgaaagccttgtaaaatacggtaaagaagtaaaagcataattctgatttgctatactatacgaacacgcactcacattagtgggtgcgtgttctatttgtttgcatgtcaattaagatacatttgtcattttatatattctatagaatttattgacagatggttagaaatgctataggatgtaagtagagatgcatttcaacaataaaatagttaggtaacggcgcctagttttcagaatattctgagactaggcgccttttttatgaaaggagtctattatgatcggtatcgatacaggtaatacggcatgggtactcatagcggctgctatggtgtttttcatgacaccaggacttgccttattttatggaggtatggcacgcagtaaaaacgtacttagcactatcatgcagagcttctttctgataggtgtgatttctgtagaatttatgctcataggctacacattgatctttggtgacgatgtacatggtattattggcagcctcaataaaattggtcttatgggcacagagaatagcatcatggaaggtgcgaatattccagaaatggcatttattgcatttcaatgtatgtttgctattatcacaccagccattatgagcggttctattacgggacgtatgcgttttgcaccctttgtagtattcgctgtgatttggtccgtactcatttataatcctatggcccattgggtatggggtggtggattcctcgctaatctaggggcactcgactttgcaggcggccttgttatccatgtattgtctggcgtatcaggtctcgtactttgtttgctcttaggtcgtcgccgcggttatgggcgcatgccaatgttaccgcatcacttgccaatgaccgtcctcggcggtgccatgttatggttcggttggttcggttttaatgccggttctgctctaggggcaagcaccttggctgcaaatgcagtgttgacgacgcaaatgtctgctgctatcggcatcgttggttgggtgttggtagaacgatatcaccgtggtaaaccgaccgtgttaggtgccgtatctggaggtgtatctggccttgttgctattacgccagcagctggttttgtaacacctgtagcagcgattccaatcggttttatcggcgccatctgttgctatgtggcggtcgcaattttaaagagcaaggttggctatgatgattctctcgatgcctttggtatccacggtgtaggtggtatgtggggtgccattgctaccggtttatttgctacggttactgtaaatcctgatggcgcagatggattgttctatggtggtaacttgctcattcctcaattgatttctcttgtcgtagctattgctcttgctattattggtacggttgtcattttcaaggtggttagctactttatggatatgcgcgttagcatcagtgccgaatctttgggtatcgacattagtgaacatggcgaaggtgcgtataatcaatctgaatttaagagcagtggacgttttattacctctgaccaacattccttggtgtaacgtattcatggtgaaagctagctttcacagatggtacaatagatgtaatgaaaacgtagatgaggtgatactatgaaacggatgaagaaagtagatatcattgctcgggcagagcaattagaagatttaaaagaagccttgaatcgcattggcattcaagggatgacggtctcccaagtatttggctgtggattgcaaaaagggcatacagaagtctatcgtgggcaagagtatgcggtcaatcttgtaccaatggtgaaggttgaaaccgttgtatgtgacgtgcctgttgatcttgtaatggatacggcgcgcgatactttgcaaactggcgaggtaggagacggtaagattttcgtgtacgatatagaagattctatgcggattagaaccggtacgcgcggtacgaaggccgttactgatgatgaagcttaattaatcatatatgtaatacgcgagctgctacataccttggtgtgtagcagctctttgtgtttatacatttgtgggtgattggttttgtaaaatttaatgctataataattgtatgactagacgattacgctcgtattggagcaaatatatacaactatataagcgaggtatactaggcatcgttgcatttattggaattacggtagtcattatctccatcttagctactattgcgagtagaggcatgggtgttatttttaatgaggtaatagcacgtcagaccatgatgcgagggactattaccgtcgctagcctgagcgccaccccatgggggaccatatcctttgaggatttgcaatgggctgatgacgatggacatcagttgatgaccgtaccttccggtaagatacgcgttaatatgtgggatgtgattactcgtaattttaaggcatctgccatacgaggcatagaattaaatgatgcggtcattgtagtagatttagatgacgataatcgggtcgattttgtgccggcttctcctgatattaataaacccttatctgaagtagaacagcgacctaaagcacctaaaaaaacgacactagaacgtcaagaagagctagggaaaaaggtgcgtaactttaactgggatggtcaacatatcgatgcaattgtgaagctttcagactgccaattggaaatattccaaaagaatcgacattatgtgatgaataatgttaatgcacgaattgatatcgatacgaatcgtgccattcgcatgaatctaacaactggtaaattcggaggcaccgccattggggatggcctcacattggaaggccgtatcgatctaaaagatgtacttaagcatcgtatgcctacgctgaatatgaatctaaatatttatggcgtagatccggcatccttaggatttggtgatagtattcacgataagatgaccttgctgacagcagtgacaggagatattaatcggccctttgcatcgggacgtgttaccatgccaattcttagaatccctgcactaacctttgaaaatgtggtaggcgatgtgacctatcaagatggcatactggattttaaagaggtatatgcgaatgtatttggcggtaagttaaaggctaaaggtgtatataatctagatacgcgggcctatgaattaacgggggtcgctacggatctagatagtagcatggccttaaaaacaccggattttgctgttcctgtatcggcgaaccttaatttttcaagtaagggacagcctaaagatatggtggtgtggggcgattttacatctggtacaggtcgttacatactcatacctatacaatctattacggggcgctttcacaatcaaggacgtcatttatcgttctttgatgtgaaagtacatacatcggtaacaactatctcaacggatgcattgcatatcgataatggcgaattaacattgggaccattgaatattacatccaatgggggtagtaattttgccatttatgatgaaagtacctttggcgagcttgggcgtacgatggatggtataaaaagtgacatggcgcaggcaaatcagaatatgaaacgcgctcaaggtaatagtcaatcgatgaatcaagaaggtataaagccatcaagtgatgcaaaaggcgttttagatgatgccaaagaagcaatcaaaggattttccgatagcttgaaatcgattaagattcgatgaagtttgaaaattttcatgttcagcttatctcctaagtataaaatgcgaaatgttatcaaaacatttgataacatagtggattatatatgtgttttattaggaggtttcttatgagaaaagctaaaaaattatctttaacacttatggcgtctgttatggctttaggcgttatagcatttacagcacaaccagctaacgcatcttatggctataaatatactgattccattcgtccaccagttttgacacctacaccatctactggtagagcacctgtggaacctgtagccactacagttacaccagctcctgctgctaaaactacaacaacagtagagcctactaaagcggctggttctgtaacaacagctaatactacaaataatacagataaaacagcacaagatattcttagctctttgctttccttgttgcaaaacttgtttaacactctatttaaataataggggataacaaaacggcggtccttattggaaccgccgttgttgcatatacaaaagcccttcggttgcgtccgaagggctttactgtttgtattattattttgtgtttttgtcagttgtttgtgtatgtttaaccttgataagaggttcgtcctttgcagcggattttgtgttggattccactttagaactcgtttctaccttggcagacgtattatctgatggtggcaagaatgtactgatttcatttttgtgaggcccgttcgtattggttgtggatgctagttgcgcccgttgtggagcgatgaaaatttcatccttcgtaatttttacgtcattcaatagtaatttgaatgcgctaggacttacgaataattgaccatctatcatgcgcggtgtaggaagcatagattcagatgtatcaaggttgataatttgcaatttgccttttcttacgatttgcgcttgatctggttggatggctagtgtagcaatgctcatgtctaccaatgcagtttttgttggtgcatcccaagctaccttatagcctaacgcttccgatacttggcgcaatgctacgagcggttggccgtccacataggctacgttttgatggtctttcaccggttctaataccttgccatctacattgatgtgatgttgtgtcgttacagatgcaggtttttctaaattttgagctggtgctggtgtttccatgccgattgctgcatgtgctggttgtgccatgcctactgtgaaagctagcgcacctagagcgatactagataaaataagctgttttagtttcataagggacctccataaggtgttatattgttttgaatatattaatattaccagatgtatatgaatattttattataaactttaatttcatgcaatttaaattaagctagaataagttaatagtttgttttgtaggagtcatagacatatactttgctaaaaaaatcaactatgttatcctaatgatgtatataaaattactagtgcatatagggtgaagattagagtcaagagagaagtaggaatgtcttctaacaataaaaatttttttaaagctatatatatgtttgttgttctttttttattggatgtggctcttgtatactcactagttcagttaggaaatggttcgtatcgtaagatagatgctatagtctgttttggggctattaatgcggtatttatatatctaaattttggggaaataaaagtcatttatagatatataaaggaaggacggtttggggaaggtataaaaaaggctatacgtttattgaaatatagtaaaacaagttattttacccgtatatcaagtataattataggtatttgttttattggttggggcatacaagttgaaagtggtatattgataaaactaatcgcgtttactattggtggtattaatctttggagatcaatataatcattattttagaacatcttaaacaattaattacgtatatagaagcgtaaatataatgaggttgaaccccctatgatataattaagtatcgcatgaattgctccatatattatattattttatagaaagaggttccttatggcatccggcagatctgaaaaagagttacaaggcgtaacgatgttaggtcacaagatcgattatcctactgattatgcaccacaggtgttagaggcgtttgataacaaacaccctgataacgattatttcgttaagtttaattgtcctgagttcactagcttgtgccctatgacagggcaaccagactttgcgaccatctatatttcttatgtgccagataagaaaatggttgagtccaaatctttgaaattatatctatttagtttccgcaatcacggggactttcatgaggactgcattaatattatcatgaaggatttgattaagttgatggatcctaaatacatcgaagtatggggcaagtttacgccgcgcggtggtttgtccatcgatccatacgcaaactatggcaagcctggtacagactgggaaaagacggcaaaagagcgccttcatttccacgatatgcaacctgaacgcgtagcgtaccgttaagatgaattacgaatttatagctgtcatctcggcaatcatattttgctttgtgtttggcctattattgtcattgcatcccacagcgctcgttgttggtaatcatagttccctacatacatacagccgatggacacggtggagtgcttacgtatcgttgatactattagtattgcgaatcgacattactgtaacagacagtatggtgccgtctagctggatgtttagtgaatggtttcagcttgtcaccattattatatttgctctcgtcctactacaaaccctgggattcgtagattttacacatggggaacgaaatgtacagtttcactattggcaagttgagcagggttacagtttaaactcttggatggaacgatatttacaacagcatcctggtcaagtagcaggggcgttggtaaattattgttatgtcttatggatgacatggcgttctatgtggcctgccatattgatgttattctggtataaactatgggctgttgaagtgaatggcttgctttcaccgattatatctagaaaagagcatatgccagatgtggtttcttatttgatattagatccacatattgtaacgtataccttggctggtttcttatggggtcatattgtattgcatgaacgaaagaacatcatcttatatggcaatagcagggctttccagtttgtgctctctaggcttatagttatcgtgggcagtcttttatggataggaattgccgttgccattgtgactgtgcctgttacgtgggattcgataattaacacacttagtaagatacgataaactcagttatttcctataaactgcggactttaaagaccctcaaaattcttgacagatatattcctaggtgttagagtaggaatatatttatagagtgtacaaatgattatacccagtgtatagtttggtaattattaaaaccgtgacttacgcccttgggagtatccaagggcgttatatttttgatagacacactgttcgtgtaatgaacgtagatatggagtacttatgatgcaaggtttgcgcgagttatggggcaaaattcaatataatattaaacgcgtcatggattctgacccggcggctactaatgtgtggatggttatatggacgtatcctcatattacagctttgttctggcatttctttgcacatcgtctctataaagcgggatggcctacattggcacgccgtatagcacttcattctcgtcatgtaacaggtattgaaattcatccgggagctaccattggtcgaggcttatttattgaccatggtatgggtgttgttatcggtgaaaccgccgtcgtcggagataatgtgacattgttccaccaagtaacattgggcggtatgtcctctaagaaaacaaaacgccatcccaccattgaagatgatgtactcattggtacaggtacaaaaattttaggggatattacgattggagctcgtactaaaatcggttgtaatctagttataaaacacgatattccaaaagatatggttatctttgaaacggatccagaaaatatgtatgttcggaaacctagacgaaagaataaaaatagcgcatcgaatgatagtccatatcctgaaaactacatagaatactatatataaatagactggtttagacctcttgctgttagatgcatatctgatggtaagaggtctttttgtttcataaaaatttcattgaaaaaaatcgataaagttattgacaatgaaaatcattattgttaatatgattatgtaataaatactgattataaattgcagaaataaataacaggcataaaagccgactggattggtcctgatgttaggacaaattgtaattgagaattaaatgaaaaaggagtaattattatgaaaaacgtacaacaagtaaatcaatatttagcagatctttccgtatggaatgtaaaattacacaaccttcatttcaatgtaactggtccacaattcaaatccatccatgaatacttagaatccatttatgatgaagcctttgaatattttgatgcagtagctgaacatgtaaaaatgcaaggtgaatttccattagtaaattctgttgaatatgctaaattagcaaaaatcggtgagctaggtcaagaagatgttcctcaacataaagttatcgaaattttacttcatgacttcaaatatatgaaagatcaagcttctgctattcgtgaagcagctggtgaagaagataatttcttgctttctaacatgatggaagaccacattgagtattatgtaaaacaaatttggttcattgaatctatgttgaaataattcaattgacaacgccttactgggtatgatatgattacccagtaaagcatggaggattactcaagaggctgaagaggacggtttgctaaatcgttagggcgggttaccgtcgctagggttcgaatccctaatcctccgccatgctgagacctcacatcgtctgatgtgaggtcttttttattaaccatacagtgtaaggaatggggatagagttgacgtattcatatctgattgcttataatgaattgtataaaatttaatttaaggagacttttatgaatacacaatatacacgtcatttgtcgatgattcgtcgcgcccttagtattggaaccctttgtttagtggcatccttcggtgtggctcatgcggaagactttgcaattcctagtgcccgtcctgtggtagatggtatgagtactgatgatgttaaagtcgtatctgctgcacatcctggtagcgctaaccttattacaccaaatgattggacatacaaagcgttaaagacgctggtaaaacatggggccattacagatacacacggatttacattcgatgatagcactagctatacaaaggatgagttgatgccgttacttgatgaagttgtggaaaaacgggaacaaatgaacgacaatgatcgtcaatttgcgttgcgtatctaccaagaaaacatgcgtgatgtcatggattatcgcattgaacgagataagaaaatcaccaaagaacggaccttaacagatgaacaaattaaggaaaaaatgaagaaattcaaaattgatgactctcgtgtaaagactaacggtgatgttcgtattcgctatacaggttccaagaatggaaaatctaaagcagatgcgcgtgtacaaacagaaatgacgttcactctataatccctgtaagggaacaacatgattaattttcttaaaaataagttgtttaccgtccatcagaatggcaaacaacatgttagtgaagtatttaagtatatcggacccggtattattgtaaccgtcggattcatcgatcctggcaactgggctgccaacttagcagccggtgctagttatgggtatgaattgctatgggttgtaacactatctacgcttatgctcatcttattgcagcataatgtggcccatttggggattgtgcgggggcaatgcctagcagaatgtgcttatgaattcttaccgaaatggttatctcgtacgatgcttagtacggcagggattgcggccgtagcaacggcgctggcggagtttattggtgctgctattgcattaaagatgctctttggtatccctctcgttatcggtagcgtgttgacggctatcgtatgtacaattatgctcattacaaactcctatagtaaattagaacgcatcatagccgggtttgtatcccttatcgcattggcctaccttgtggaggtcaatatggttgatgttaattgggctgcagcgggtattggctgggtcaatccgagcatacctaatgaatcgatgctcgttatcttgagcattttaggggccgtcgttatgcctcataatttgtttttgcactccgaggtcatccaaagtcgtcagtttaatcgacaagataaggagattatgcatcgccagttgcgatatgaattcgtagatacattattatctatgggcattggttggatgattaactccgccatgattatactagcggcggccgtattttttagtcatggcattgctgttaccgaattagaacaggctgaggaattattgagacctttaattggacctgctgcaggtaccatctttgcattggccttgctgtttgccggccttgcatcatcggcgacagctggtatggctggggcgagcatatttgctggcatgtttggcgagtcctatgatatgaaggactttcatagtcgcttgggattggggttaacatatattcctgcactattattgattctgtttattacggattcctttcaagcattgctcgtttcgcaaatgttcttgagtttacagttgccgattactatattcctgcaattatatatgacgagtagccgtcgtgttatgggcgcttatacgaaccgccgatttacggggattattctttggggcattggtattatcgtaacattgatgaatatttacttattagttataggctaatatataccgcttgtttttgtgaaagctttcacagaaataggcggtattttattttgtttagaaccagaaccaaatagatttatgaaatgtagttgtagtaacgtataagcctgtgaaatatggtacaataaagaatagaatttaatttgctactatagcagtttatatatgtttttgggaggatttcatggcaacagaaaaagatatgaatgaattaaatgcaccattacaatctgattataaagaggttgttcacgacattgcagaagaattattagcgcgtcttaacattgaagaggatggcgctattatcgatatgttccaaacaggctccttagatccttggcaattattcgtattcttctccgcattagaacatgcacttatggaatttagaacggacaaacgcaaaaaaaccgttatcgttcatgcccaaccagaggccctcgttggtacaggccctgttgtaacacctgtatccacaatgcttgagcatattttaatgtctcgcgtaaatgatatgagcgaaggccgtttagaaaccggtttgcttaccgtgtctggtgaaagcatcgattacgaaggggttaatcttaagggacgccatgtagttatcatttgcgatatccacgataatgaatctccttatttggcagaatgcattaaattgtgtaaagaaatgaaagctagtcacgttgtggcagtgcctctcatgttgtggaatccagatcttattgacaatttgacagaggaaagtatcaaggcggaattgtcccatgaaaatcgtcctctctcctagtaagacaaaaacaatttcccatactgcagcagtaatccgtgacggtcaatttcagcctcatattactcaagagattgtaaatcatgtacaatctctcgatgtggcatcacttggcaaggccttgaaattaaaggatgataaggcacaagcgctctttgatttttatcaagattttgagtttcatccagtaggtgtcgcttgtgaaagttacgatgggatcgcttttaaatatttagactgggcaggactatctgatgaggctaaagcctttggtgagaagcatctcgttatcatgtctgcgttatacggcgttgtagagcctacgatgggcgtacgtgactatcgattagatatggtcgataagatagggattaatttatatgaaacctggcgtgacgtggtagatgcatactttcacaaggaggattggatcctaaacttagcgtctaaagaatatgcaaaaatggtgaaccatccaaaggtggtaaccgttgaattttgggaattacgaggcgatacatataaacagatgagtacgtcctccaaaatgagtcgtggtatgatggcgcatgcatgtttgacgaaacaagtgaagtatgtacaggatttgccacgtgaaattaatggatttgtctgtgttacagatattgaatccattacgataccaagcgaatcgatgccgattcgttatgaaaggaagtgatgatttgcaagtgcaagatattctcgcaaaagacctcgtcggcgatgaatggctgacagaggatgagctaagatttctcatgtctgtaactgatgaagaacagttgcagttaatttataaaaaggcgtacgaagtgaaggcaaaatatgtacagcctgtagcgtattatcgtggcctcatcgagttctcgaaccgatgcattaaaaactgtaattactgtggtattcgtcgcgaaaatgataagacggaacgttttgatatgaatcgtgaagatatcatcaagatggcgcagtgggcctatgaccatgaatatggttctattacgcttcaatctggagaacgttgtgatgatgtatttgtcgattatgtagtcgatcttatccgcgacatcaaagccatcggcgatggttcccttggcattacgatgtgtgtaggggagcaaagtgaagaggcgtaccgccgtatgcgtgaggcgggtgctagccgctatttattgcgcattgaaaccacaaataaagaactgtaccataaaattcatcctcaagatgaattacactcctttgaaacgcgtgttgaatgtttacgccgtttgcgtcgtgtaggatttcaagtgggtacaggcgttatgattggtctgcctgggcaaacagaggaagaccttgtgaacgatatcttgttctaccgtgatatggatatcgatatgattggcatgggtccctatgtggtgcatcatgatacgccattaggccaagaggcgttagcaatgggcattgatgatgaggctggtaaattgcgccgtattcaactagggctcaagatgattgccttaacgcgtctattcttgaaagacgtaaatattgcagctactacagcgttacaagcattagatccactaggtcgtgaaaaggggctcgctgcaggtgccaatattttgatgcctatcattacaatcccagaacatcgtgccaaatatttgttatatgataataaaccatgcgtggatgataatgcagataaatgtaaagattgcttgacgcgtcgcgttatgtccattggtgataccgttgggtggaagcaaaatggggattccaagcattatggtaagaggactgggtcattttaaacacattgatatagattattgattaaattgtttataattgttatatttatgtagaaatataaataaaacccagatataataagaacatagtttattttgttttattatatgaggtgattttatggaaacaaaatggtattctgacttttggaatctattgactcaaccattcaagggtggtatcgatcaagtcgtacagtatggtacattgaaaaagggcttcttagggacagcgctcttatgggcgattccttacattttactaggtttgtttggggccttgttgttcccattgcttcctagaagcgaattttctgctatgggcatgctccttggggctggcgtaggcttcttctttattctagcctatattgctagtatcatttggtcctttgtcatggtggctgttgggtcctatgtatttaactgggtggctgtaaaaatgggcggtgctgatgatgtacagtctgttatgaaggtccaatggtatttacaaggttatgaagtattattatgtacttgtgtgtatacaattgttttcatacttatggctatcttcggtggcctatttggtagctctacattatccaagcttatttctaatttaggctctttagcaatttttgttttatccgtatgggtaggcttagaattaatggcaagacaaactacgttgactaagatgcaagtattcattgccggtatcgtaacatttgttatcttcgtcattatttcgcttattttcctagctctttttggtggctgtgcagccttggtaggccgataatttcattattataaaaaatcctcttttttcgataaatattttttcggaaaaagaggatttttatagtattacgtcgaaatcatatatcaagaactcaaagtttcacataaggaggcgattccgatgaaagaatatagtagtgatcagattcgtaatgtagctgtggtgtcccacgatggggcagggaaaacggctttagtagaatccttgttattaacctctggtgctgttgattttgttggccgtggtcaagataataaacatattatggactttgagccagaagagattaaacggaatgtaacgattcaattgggtatggccccttgtgaatggcatgaccataaggttaactttattgatacaccgggttacaatgaattccatggcgaagttcgtgccgcattgcgtgcttgtgatggcatgttaatggtattatctgcaacgactggcgttgaaacagatacggtgcgcgcgtgggattatgctgttgaattacaaatgccacgtatggcatttatcaataaaatggacgttgatggtgctgatttcttcggtactattgaacgtatgcgtgaactatttggcaaggcaattatgccactccaaattccaattggcgaaggtgccaattttgaaggcgttatagacgtagccaaaatgactgcgtttacttacaaagacggccaaccaacagagattgctgtaccggctcatcttatcgaaaaggcccaagaaatacgggaaatgaccgtagaggccgcggctgaaggtagcgatgaattgttggaaaaatatttagaaggcgaagaactttcattagaagaaattcgtcaaggtctacgcgaagggatgattacaggccgtgtgtgtccaatcatgtgtggcagcgccacatcccgtattggcttagatcaagtattagacagaatgattcggtatatgccagatgcagcaaaaaaagtgatgactgctgaatcagcagacactggtgaaccagttgtggtgcatgtggataaacccctaaccgcattcgtgtttaaaaccttgcttgacccattcgcaggcaaacaaagctttgtacgcatcttctctggtgaactcaaagaaggtgataagctgttcaatgttaatcaaggaattgaggaaaaatggaataagatggttacccttatcgggaagcaacaaattccagtgactgccgcaaaagctggcgatatcgtagtgataccgaaattagctaatgccaaaacaggcgataccttaacagctcctgattttaaggtgaagtacgatgcgattcgtttccctcaacctttatataccgtagctatggaagctgtgaaaaaaggtgaagaggaaaaattagctagtgctgtgttaaaagtagccgaagaagatccgacttgtgtagttgtgaaaaatccggaagctcgccaattgcaaattgactgcatgggcgaagtacacttagaacatatccttaacaagatggaccgtaaatacggcgtacaagcgaaacttgtaacaccatatattccataccgtgaaacaattaaaggatctgcagaaacagaatcgaaatataaaaaacaaagtggcggtcatggtcaatatggacatgttaaaattcaagttgatccattatatgatggtcaagaatttgcctttgtagacaagatttttggtggtgctgtaccaagacaatatataccagcagtggaaaagggtgccagagaaaccctagaaaaaggcttaattgcgggatatcctatgattggcgtgcaagtgacactcttggatggatcttaccacagtgtagactcctcagagttagcatttaaagtagctacgtcacaggctatcaaggatgtaattccaaaggcgaaaccagtcctattagaaccaatctatgaagttaacgtgtttgcaccagatgctttcatgggtgacatcatgggcgatttaaatagtcgtcgaggtcgtgtattaggcatggaacaaagtgaaagaacaggtatatctgttgttaaagcgcaagtaccgttggcagaaatgtcagattatgttactgttttgcgctctatgacacaaggtcaaggcgtatttaatcgtcagttctacagttatgaagaggttcctcacaaacaagcagatgaaataatcgctgcttttaaggaacaagattaatgtaaaaactgtccacgtagttaatttcattgagaattgacatttcactaacaacttcatatacaactaaatataaaacttaatatacaatttcatatgtataacaatcattgacgtaagtcataaatttgaatagtattttacaaaccctccatatatgtagcgtatggagggtttatatttatgtaatcctatgtggaagctaagctttttatgtgctacgatagaggtataaagatcgtattactattgtattttagtatagtatgtctatgcagtatggttcctatagaaaggatatagttatgtttttctccagtatacatgcagattatacaaaaatgggctacccagcagccattgttcgagcccttgatttcttaaaaaacactgatttacaagcattgccaggaggtcgtcatgctatcgaaggcgatatcatgtatgctaatgtagatgatgtggaaacaaaattatttgaaactacaaaaccagaatctcataaaaattatatagatatacagtttatggtgaagggtcaagagaatatgggcttttttgtggaccatggccgagtaaagcctatcgaatcctatcctgaacgagactgctatttttatcctaatgaatctgtcgatgaagggcacatccactgtccagaagggtattatacggtatttttcccatcggatattcatcgtcctcttttagcggttgacgataagcctataaaaattcgtaaggttgttgtaaaggtgcatgtgtctctattaggtgagtaacatgatgaaacgatatgaaattatcggtattatattaacattattaggcgccaccttatggggcgtgtcaggcacatctgtccaattcgtaggcaattttcgtaatatgaacctggaatggctattgacgatgcgtcttattacggcaggactgttaaccgttctatatggatggattcgtcaaggcaatgctatttttaatgtattacgtaattggcgagatacattaggcctcataatatttggcgtatttggtatggccctgtgccaatatacctatttccgttccatcgtcatcgccggtgcgggtattgcgacggtgctgcaatatttggcgccgtctatgattatcatttatttgctggtgcgctatggaaaacggccgtccacaggagaaatcatttcagttatccttgctttagtaggtactatttgcttgatgggcaataatggtttttcttttgaaagcttccgcagtgatgtattattctggggcttattatctgccgtgggcgtagccgtatatagtgtttccccagtgcgattattagctacctacgggacaattcctattgtaggatttggtatgctcctcagtggtcttgtggcagcggtccttttccagcaacctcattcgtatgcgacgtgggatgtatggactgtggtaggctgttttaatgtagtctttcttggcaccatcgtgtcctttaatgcgtaccttgaaggggttaaacgcgttggtgctgtctcaggatctattttgtcatcgattgagccgatttcggcagctttctttggatgggctttgttaggtaatcaatttaattgggttggtatcttagggatggccatgattattgctacagttatcatcattgccttagaaaaacgaggtcaatcatcttaatgataaactctttgtaatagtaatcaatccttatgcggaggttgtatggaagaaaaacagtggataggcatgggccttgccattatgggggcactattttgggggctttcaggtacatcggtgcaattcctcgaaaatgcaaagcatttaaatgtagagtggctgttagaagtgcgcttacttttagcaggtttattaacaattctactctcctatatacaggatgggatacgaatttttgatatatttaaaaatccaaaagactttggtaaactcctcatattcggtttattgggcattgcgttagcacagtactcgtactttaaagctatcgctatttcaggtgtaggcgtggctactgtattacaatatgtagcaccgacgttgctcattatttatttattcttacgatattttaaaaagccatccttaccagaattatactgtgtggccctcgctatgattggtacggtgtgtattatcatgcaaaaggggctaaatctatctgcatttaatggggatgctttgttttggggcctcatttctgcggcgagtatttgtgtttacacattggaacctattgaactcttaaaaaaatacagtacatcatccatcgttggctttgggatgtttatatctggcattttggcgtgtatcgtattccatcaagtggcatcagaagctatttgggatggtatgacttgggttggtttgtttacgattattatcctagggactgtagtatcctttaatgcctatattgaaggtgtgcgtcgtattggtgctattcaaggttcaatcttgtcttctttagagccgatttcagccgccttgtttggctgggttttgttaggtaatgaatttacattggttggtatattcgggatgttctgcatcatcgcaaccgtatttattattgcctgggatcgacaacgacaacttaaacgagatgtattggaaaaacttaataaagaagaaattgcgtagattcaatgagtcttaaacataaatagattacttttaaaacctatatagctatgattatcatattttgtcatagtaatataggtttttgttattttatgtaaggtggtattcgatttatactgtatacatagttccgtttgttgactattcctacatctattcatatagtagaagtagatagatttagctttattaaggagataattatggacattaaggaatttatacaacagcgtcgtgatgcgtttatagctatgcgccgcgattttcatatgtatccagagccagcgtggctcgagtaccgctctgcatccaaggttgcagataaactcatttcattgggttatgatgtggcactcggtgcagaagtgcttgatttagattctcgtatgggtttgcctagcgaggatgttatgaaagcagcaatggctcgtgctatggatgaaggtgctgatcctgaactagtagagaagatgggctatggtaaaacagctattgtggcaactatgaagtttagtgatgatggtcctgtagtagcgttccgtgcagatatggattccaatgatgtaatcgaatctaaagcatctaaccatattcctgctaagaatggtttccgttcccgccatgagaaggctatgcatgcttgtggtcatgatacacatatgacaatgggtcttggccttgctgaatatattgctacacataaggatggcttgaagggtactattaaactgatcttccaaccagcagaggaaggcgtacgtggtgctaaagcgatggtagaggctggtgtagtagatgatgtagacttgatgttcggcatgcatatcggatttaatgaacagttatctaattgctttgcttgtagtgatcatggctttttagcgactacaaaacttgatgctgtattccatggctattcttcccatgcaggtggttctccagaaaaggctcaaaatgccatgcttgcaggttgtacagcggttattaacttacaagccattgctcgccatagtgggggtgcatctcgcatgaatgtaggtgtttttgaaagtggtacaggtcgcaatgttactcctgatgtagcaacacttaaattagaaactcgtggtgctactacagacatcaataattatatgattgaacgcactaagaccattattaaaggtgccgcagaaatgcatgattgtacctttgaaattacaaaacaaggtgaaactcctgcaggccgtattagcgatgatttagctcgcgaagtacaatctatcattgaaccattaggtatctttaaagaagttccattcgattatagcggtggcggtagtgaagactgtgcttacttcttaaatcgtgttattgatcgtggtggtcgagcaacctatatggtattgggctcagctattaaagcacctcatcataatccattattcgatatcgatgaagaagatatgttaaacggcattgttgcattaggtacaattgctactcactatttaaaataggacatattgattgagatattgcgatgtatatatccgaactatagatacataactatatagatgcataattatatagttgcataactatatagatggatgaatagaaatatgtatagtgtgctatatattagatgtaatagggggattagattgtgaggtgttatatgatccaacgagagcgtttagctaaggactttgattctatggcacagttgactgcacctggtgaaggtataaatcggctagctttcaccgatgcagattggaaggggcgccaatatattattgaccgcatgactgatgcgggtctaactgtagagagagatgattttggaaatgtgctaggctataaggtaggtaagaatcctgatttaccggttgtcatggttggttctcatacggatagcgtacctaatgggggcaattatgatggtgttgtaggtgtattatctgctatcgaagcggttcgcagtatgactgatgatggttttgaacatgatcataccattgcagtagtagactttatgtgtgaagagtctagccgctttggagcagctacattgggtagtaaagctatgcgcggtgaattgacattgcaagatttacatcgcttagtagataaacaaggcatttccttgtatgacgcattaaaagagcgtaatttaaatccagatgctattgagcatatggaatataagagacctgtaaagtctttcacagaaattcatattgaacaaggtaaagtgttagagtacgaagctaagcctatcggtattgtaacggggattgctgcaccagaacggttctatgtaaccattcgtggtaatgcggatcatagtggggccacaccaatgaacttgcgtcatgatgcactctgtggggcttctaaaatcattctcggtattgaggagattgcatccatgcaagaagagcctccagtagtgggtacagtcggtgtagtagaggttgtgccaggagcgatgaacgttattcctggggccgttaaactgggcgtagatattcgcagtatttctaaggtggcccgagattctgtagttaccctcattaaggaatttattgatgttattgcagagaaacgaggcttatcctatacgattgagcctgttgcacaagattatccggtggcgatgcattcagcaatgattcgcgaaattgaagaggctgttcagtctgtaggcgtagactatatgactatgccaagcggtgctggtcatgatgccatgcattgggctgatgatgttcctacaggaatgatttttataccatgccgcgaaggtattagccataatccggctgaatttgcagatatggatgacatcgttacgggagctaagatattagacacggtgctaagaaagcttagcttagaaagtactaaacttaactaggttgagtgcggtgtaatatttgatgtagatataatttagttagatttgtgttaactacctaagatatcatattttacgtggttagaaggatgtattccgtaatagaatggcagagaatacttgctattggtagggaatacccggattggagagattatggttattgctggtattgttatcgtagtggcaacgtttattgccattattaagcagtttgaaacacggctcgttttattgttgtcgggcttgttaatgtgctttattggtgggcaacttagtgctggtacgacagcctttgtaaaagaacttacaaatccagggcttgtaccaaccatttgtacagtacttggttttagttatgttatggaatatacaaaatgtacagagcacatggtatatttcatctctgcaggccttaaaaagatgactaaaatcatcatccctggtgctgttattattacgttcttgatcaacattgcgttgcctacagcggcaggctgtgcagctgcagtaggtgctctattaattcctgcacttattcgctccggtgtgcatccagcgatggcaggctctgctattttcttaggaacttggggtagtgcattgagtcctggtcttatgtttaaccctcaagtagcacaacttgccggtgaagatgtaatgaccgttatcgctagcttctctatgcaagccattattggcattgtcgtagcagctatcttgctcaatatcgtagctatcgttaagaaagagcatacaggatatgtattgaaagatgctaacgaagaagaaggtaaagaatttaaagtaaattatttatatgctatcatcccaatcattccgcttgtattactcgtacttggtagtaaacaagtagcagtgattcctgaaatttctgttcctgtatctatgctcattggtacagctattggtattattgctgtacgtcctaatgtaacggaagcagttaagaaattcttccgcggtactggcgatggcatgtgtgatgtagtcggtcttatggctgcggcggcagcctttacagctggtatgcaatatatcggccttacaagtgcactcattgatggtatgaagaactctcaacaaatcgctcaaattggtgctgcctttggtccattcttattagctgttatctctggttctggtaatgcagcagcccttgcctttaacggagctgttacaccgcatgcggcagactttggctatggcattatgcaactcggctctatggcccaattaggtgctggcatcggtcgtagcatgagtcccgtagcaggtgcaggtatcatcattgccggtcttgcaggtattaaccctatggaaatggcaaaacgcaatgctgtaccatgtattattgctacagtagtgattatgctattgttactatagttctatatggggtggcttagtaaaagcctaataattactatgattaaagtagttatataaaagaaaacccgtcatgattcttaagtcatgacgggttctttttttgcatatattaagatataagatataagcaaaatttatggatactaaagaaaagagcaatttgtttttattgcactttcataatatattatatgtattaaaggaatagatgctatgctttggtgttggaccaggttttcataaaattataaaatgcttgaactggtttggactcaagtgcactatggcgggtgtacatccacgtatcacgagtcatgatgtgaccatcaagatcctttaaggtttccttaaatagcttagggtaatcgttgccacagctttgggtgaggatggtaaaaccaagtccttggttaacgagcttcatgcaggtatcgatatcatttacctcgatggtgcgcatcggtggttgtgagtagtgagaataccaccaatcatctatagtttgctgtaaatttggatctgtttgatagtgaatatatggcagacgaggtaaatcttctacggaacaaggagttttgttaaagaagcagaatggttctgaccaaatatgttctttcgactctgtccaagtgtgagcaccgcggatgatggcagcatgtagacggccttcaaggaagtcatggtatagcttatagctgaggcccgtatacatgatgatatcaatgtgcggatacgcctctttaaaggtcgataagatatggggaatatgatacttagcgaatacatttgagcatcctaggtttaatgtaccgcgtggttcactgcccatcgctaatagctcttggcgcaccgaagtgtaggaattgagcaaatcttcggcatagcgtacaaggcgctgaccttggtaggtaaactctacaccacgagcttgtcggttgatgatgggacagttaaattccttttctaatttttttatccgttcactcaatgcgggttgtgtcataaatagacgacgcgccgcataagtaatattattttcctctgctaaggtttttaaaattgtacaatctttcgtgtccataaactctcctttacatatgtattattgtactctatcccatagagttggtacagatgaggggccgctagggctatacagattagatataactaacgactagatgctaataagaggaataaaactttcaccaatacacatggtgaaagtatagcgtttgtaaaggtttacacatgcctgaaagtataaaggagcaagtcatggttgagttaatttcaaatggtgtatttttatatcacggtacggatatcgttcctgcagattctagtgcagcccttgatcagcaagaagtttttaataaagagcgcgcctataaggaaacgatggcgtaccgtattttaatggaccaccaacaacatgaaggtgatcaagatttacgcatcaaattcgatgccttaacatctcacgatattacctatgttggtattatccaaactgcgattgccagtggtctagataaattcccaatcccttacattttgacaaactgccataacagtttagccgctgtagggggcacaattaacgaagacgaccatgtatttggcttgtctgcagtgcaacgatttggcggcgtctatgtacctcctcatcttgctgttattcaccaatacatgcgtgaaacaatggcaggttgtggcaaaatgatcctcggttccgatagccatactcggtacggtgcacttggtactatggcgattggcgaaggcggtccagagcttgtaaaacaattgctcggtcgtacctatgatgtacaacgtccagaggttatcgctatctacctagatggtaaacctaaacatggcgtaggcccacaagacgtggctctcgctattgaaaaagctgtatttaaaaatggctttgtaaaaaataaagtcatggaattcgtaggccctggtattgaacatttgtccatggacttccgtaacggcatcgatgtaatgactacagaaactacatgccttacaacaatctggagaacagacagcactacaaaagaattcttaacacttcatggtcgcggtgatgcgtacaaagagcttaatcctggcgatgtagcttactatgatggccttgttaaggttaaccttgacgaagtggaaagcatgattgctatgccattccacccaagtaatgtatatactattaaagaaatcaacgaaggcggtcgcgatttactcgcagaaatcgaacgccaagctgttgaacaattagataacaaatccttgtccttgcaattgcctgaaaaacacttcgatggcaaattacacttagatcaaggtatcatcgtaggttgttctggtggtttgtatgaaaatattatgcaagccgcaaatatcgtacgcggtaagagtgtaggctccgggcgttttgcgttcagcgtatatccttctagccagccaatttacttagaacttatgaaaaatggtgctctcgtagaccttatgagcgctggtgccatcgtgcgtacagccttctgtggcccttgcttcggcgcaggcgatacacctaataatacgggcctcagtggtcgtcatgcgacacgtaacttcccgaatcgtgaaggttctaaaccagggaatggtcagatttcttccgttgcacttcttgactcccgttctgtagcagctacggctattaacggtggtgcattgacggcggctactgatatcgaatatgatgatgtggtgccagcttaccactatgatgataaaccttatgaaagcaaggtatatagtggctttaacgaacctaataaagatactgaacttgtgtatggcccatccattaaaccatggccttctatcgaagaattgacgccaaatgtattgctcaaagtagcagcttatatcgacgatcctgtaacaactacagatgagttgattccgtctggcgaaacatcttcctaccgctctgacccatatgcattgtctgaatttgccttgagccgtaaggttcctgaatatgtaggtcgtgctaaagccgttcgcgattgggaaaaatctcgtcaagaaggtgaaagcgcagcagatttagtaactgcatatgaagaggtaaaacaagcgcttgatcttacagaatctgtagaagatatggctaagtctacagccgtttctagcatggtatatgcaaatcgccctggcgatggctccgctcgtgagcaagcagcatcctgtcaacgcgtattgggtggcggtgctaatattgctattgaatatgctacaaaacgttatcgcagcaatgttattaactggggcatgctaccgttcctaactagcgaagaagactccaaaactatggcagtaggcgattatgtttatgtgccaaatgtgcgtgaccaattattctctgactccgatgattacaaagcatatgttatcagcggtggcgtgaagaaagcagaaatcacattgcacttaggtcacctcagcgatgaagaaaaagatattatcgcagcaggttgtctcatcaactactatgcaaatagcaaagcgtaagtggtgagcataaaggagtaagttatgaacgggtataaagaaattcctgttacctatatgcgcggcggtactagcaaaggggcgtatctgttaaaagatacgcttccaactgaccaagctgctcgggatcgtatgattttagatttatatggctctcctgatgcgcgtcaaattaatggtatcggtggtgctgatccattgacgagcaaggtggctatcgtaaacccttctgaccgcgatgatgcggatatcgactacacctttggctatgtcggtatcgctgatgcggtggtagattacgaaggtaattgtggcaatatttctgctggtgcaggggtatttgctattatggaaggctttgtgaaagcagtagaaccagaaacagtggttcgtatctttaacacaaatacaaataaggttattgaagcgcacgtgccagtccaagaaggcaaacctgttattgacggtgattttgctatcgatggcgtacctggtacaggtgctcgtattacattatatttcttggagcctggcggttctaagacaggtaagctactaccaacaggcaatgtacaagacacaattacattgtctgatggtcgcacaatccaagtcagtctcgtagatgcagctaatccagctgtatttgtaaaggctacagaccttggttatgaaggcacggagttaccggctttcacagaaacggatggcggtgtattactcaatacacttgaagatattcgcactactgcagctgtaatgatgggatttgctccatctaaagaggctgctagtcctgcagttccaaaggtatgcatggtgtccgcaccacaaacctatgtggcaagcgatggtcgaactatcaaggggaatagtatagacatcgtggctcgtacaaaggcactcgctgtaatgcataaagcgtatgctgttacaggtggtatttgtacagctacagcagcgcttattacggggactgtggcgaacgaagtagtgagcgaacgtgctaaagaaacgaatcaagttactttagcgcatccatcagggaaatttgatttcgaaatatgtttaaccaaagataagggttggcatgtggagaaggcgggcgtcgctagaacagcgcgaccgatcatgaaaggcatagcttatgttaaaggagagtaagaatgaataagctacttaaaattgcaattatgtttgccattcctctggcaatgtggttcattacaccaccagaaggtttgagcgttggagcttggcgactgctaggtttctatttaatggctatcgttggtcttgttgttaaaccttggccagcaccaattatcttgttattatctattgcaggttctgcaattttcttgaatgctacgaaaaacgtattgtctggttatgcatctaccacagtatggttagtattctctgcgttctccctcagtgtggcgttcgtaaaaacaggccttggccgtcgtattgcgtacctattgattaaatccttaggtcacactacattgcgtcttggctatgtaactgctttattagatcttattatttccccagtaacaccttccaacacagcacgttgtggcggtatcgtgttcccaatcatgaactctgtagcaaaagcgttaggttctgagcctggtgaaagcgctaaaaaagctggttcttacctcatggttaacacatacatggtaactaaggtaacaagcttgatgttcgctacagcaatggcaccaaacttattggctgctgactacatgaacaaaatcctcggtgtagatattaactggggcctttgggcattagcactcgtagtaccaggtcttgtaatgcttctcattacacctgctttggtatactacttagacaaaccatctattcaacacatcgactctcatgcgattgctgatgaaggtttgaaagaacttggacctatgtctggtcgcgagaaatctcttattgctatctttattcttgccttagttggctgggcgttgccttccatcttgacgcaaggctttggcattaaattctcccttgatgcaacagcagtagctatcgtagccatggtagcagcgcttgtaacaggcgtaatcaaatgggaagatatgcttgaatccaaaggtgcttggaacacattgatctggttcggtggtatcatcggtatgtccagtgcgttgtccaaggttaaattctttgaatggttagctgactttatggggacacacttcaacttcggcgacaacccgatgttggctcttattatcatcggcgctatcagtatcgctgttcgttacttgttcgcttctggtagtgcgtatgtagttgcaatgcttccagtattccttactgtaggtaaagtagcgggtgtaaacccaatggcgttgtccttgttactagctgctacaaactcctacggtggtgcgttgactcactacggcggtgcagcggctccaatcgtattcggtgctggttacaacacagttaaaagctggtggattatcggtggtatcttcgctatcatgtgcttcatcgtaaaccttacagtgggctacgcatggtgggaaattcttggtatcctataatacctaactagagacaatagttattctatacatatagaatgatcatcccctagatagtgaaagtttctatacttttacaaacaacataataaaagagctgtttcggaatcagtacacacacatctgagttctgagaacagctctttttatttgtttatatagtttctttaatgcatttgcactattttcgttgtattacggcattactttagttttaacgcaacccatagtgcagcgccgataaaggtaaggctacatgcccagaaaagggttgtgaagccaaattgagcggctacaatggaaccaccaaaggagcctagaaagtaacccatagacaaacaagactgattgtacgagaatatttgtcccgtatattccttaggtgtttttgatgctaaataggtattgagcgcaggtaacataccacctagcccaaaaccttgcaagaaacggataaacccaagtacatacacagagtccacataggcttgcggtatattgagtagacctacatagatcatcgagtagatgagcacctttctagggcctatacggtctactaatttcccgagtggagagctactaaagaattgggcgatacccatggcagagaacacagcaccagaaataaaggctatattttccgtattgcttggtagcattcctttaatgtaaaccgtcataatgggggagatggcggtaaccgaaatggcatacaggaaggaggttgcagataaagcgactaaactagaaaactcaggtaagtgagtttttagatttctaaaggtttgcttctcaacaagtggctttggaacatagttttcatgtaccagcattgccgtcaagccaaaagagataagcataagggccccgatgataaagaagtcatttcgaatacctactacatcactgagataccctcctacaagcggaccggctagtgagcctgcaaggctaaaggatcctataatccctagagcccaacctgtatggttttgcggtgtttctgacgcgataagtgttaccgatgcggggtaaaaaccgcttactaacccttgcaatgtacgaacgaggaacacaccttctggtgtagtctgaaagcccaataatatactacatatagccataccaagactagagcgtatgagggtaatcttacgtcccttacggtctgctaatcggccccagaagggagctgctaagcagacaatgaggaaggtgatgcccatggaggcaccggaccattgtgctatcgatcctgtatcgcttaagcccatttcatggaagtatagaggaagaatagggcttacctgactaaccccgagggacatgaagaatatgcagaatgcgcaaatgtacaccgttcgtttccacgtttccaaagtatccctcctttagtctttctttttaacttcttcccaatcgcttaagtccggcagtttattgcttgttatagattcttgaatccagtagttaatagaggttaagttgctagaatcccgttcaaagccatatacgatctcgtctcctatgtcgtcttctgtagtgatatagaggcgaatgtgtaagtttttaccttttccgcgctcgatgaagtagctaatacccggatcgtcgaggttggatgggcgaaccgcaatgatatcgtacgtgccattggctacgccttctaaggcatccttaatcatttgattggaaagttcatattgattgaggtagaaaatatcgttgtcgcaagttaatacatattctcgaggtggcgtagtatttttgtactgtttctcccagctttcatcaatcacaggcaatgtagcatgatcatagaattctttaattaaacggagaccttcagaaatagacatctccttaaagtctcttatttcatatatcgtaggctccaaggtttcatcacattccgcaggatcctcgctgtagccgtataaatagatattacaagtgttcttatcttcattgtggaacataacgatactgtatacatcgtaaattacgttttctatggattggcgattatcgtagatgataaaactgaggtatttttgtgtatcccattcgcgttcgatgaacggccagtcgtatttattggtacgccaaccagtagtagagtcctcgaaaatttctaatacatctacggagttttgaggccatgcaggtggcataggattacacgttgtagaagattgcgttatcccttctttgtactgataatgtccatcaacgagttcaaaggcttctaatcgctcagatgcttcgtcaggaattgccaacggctcaccagtgcctaaccaattatcgtttcttgtgttgagacgattgatgctttcacgagcatgctcgtagaacgtaacggcttggtctaaatcgggttcttttgtaatggcaccaatttcgtgtagcaatagccggctgctagttgccatagatggtccgcatagtcataactaccgtatctatcgaaacatttgctagccttattaacgcactctatggcggttcttatggcaggggtattaccttttttgaaagtaaatacataagcgagatacggccaaatcgcatcgagagtgtaaatcgctggttgttgtaataagtgagcgatgcgagaccagtcttgggactgaccatcgatattcaatgtgcgaagaatgatggcttgcatggtaacataagcatggtcattaaagtctaaataatttgggcttatagcagcacgctcgtaatatctgagggccttttgaatattctgagggattcttttgttagactcacatggttttgcatagtactcggcagcttcacgcaaacacatgccattattcatggcggcaccgcgctcaaaatattcgagtgctcgttcatgctccccgcgagacttacaaatatcgccagctaaatacatcatgagtggcaaacctgctgcagccccttcaaaaatgacttgctcttccatcttcctattatcttgctctatataggtaatgcgcaagttgcggtatgcaataacaaggcctgcttcagcggatttacgcaaccattgctgagcaatggcagttattttatttgcgaatctacgttgatctgcttgggcaaacaagccttttaagaaacggacaaaggaagatggttcaccttcattagccaccttttgagccgatggcaagatgtggtaatccccccattggaatacattggcaatggcataggcacagtaggaacaacccttttgggcgccctcatagacgcgctggaaggcttggtcctttgtcataggcaactctttttcaatcgttggtgtaagggcaccagaggtacgcatagcttgtaaaatagcgatggcactgcctttgcgaatagctgtatgtaaataactatacgcctttgtgtcatcctcaggaaagcctgcttcaatccaggtgaactgagggccagaatagacgcgtgccaaaatagcgtacacatcgccaataccaggaatcttttgaccttcctcgtcaagtttcacaagggcgtcaagctcagccttaccctcccaagcgatatctttattacattgatggaatattttattgaaagactgctgtatttgatcagtaaaataaaaattcatgctctctcctccgcataataatcagtagaagctgataacatatgtaatttcagtataccattagtatttagaggaaaacaatataaatattctgaatttggaggggactagggaaatcagtaattggattatatatgggtattaggtgatgaacaaatgtaaggataaggtgaaagttgagatttttcttgactttcattctatagaaacattataatcagattataattttatactcgcctaaaagaaaccgatgaggtggagataaaaataggaaatgcactcacagagagcgggattagctgagaacccgtagtacgcagcttattaaatggaccaccgagggcgcatggaacagaatgaactttcattcctagtatggtgcgacgtcacacgagcgttagtcgtgagggatatgttagtatcctgcgaaaggggaatgcgctgcattcaaacaaggtggtaccgcgatttatagcataatacaatcatattgtaataatagaactatagactcgtccttgacgttacattgtcatgggcgagtttttttattggcaaatgccagatggaggttctcatgattttccctagtcttgaccgtgtgaaagctatcgcaccgggctacgatatcgtgcctgtatatatggaaatattatccgacgtacgcacaccgattagcgtgttgaaagcgttaaaacaagtgagcagtcatacgtacttgcttgaaagtgcggataatagtaatcattggggccgttactccttcttgggctacgatcctaagattgagctcttctgcaaaaaccataaaatgactatcaaagacggtataacgtgtacctttgaatgctctgacccagctgcagaaattcgcaatattttgagccaatataaaagccctcgcttagaagagctaccaacctttacaggtggctttgtagggtatttcgcttgcgaatacattcgctacatcgagccaacattggacttcccaacaccagacgatgactccgccatggtcaatgatgtagaccttatgctcttcgacaaagtcatcgcattcgaccattacaaaaataaaatttacttaatcgctaatatcagtacaaatgatttagaacgcaactacaacaaggctgagcttgaacttaaagcactagctgatctcgtagtaaacggcaaagaggcggacattccaaaaggcatccttaaaacagagtttacctctgagtttacaaaggatgagtttgaagcagttgttaaaaagacacagcattacatcaaggaaggggatatcttccaatgtgttgtatctaatcgccgtgaagctgagttcgatggtagcttgttaaatgcgtaccgcgtattgcgtacattgaacccatctccatatatgttctacttatctggtggcgatgtagagcttacaggtgcctctccagaaacattggtaaaattgacggatggtaaaatgtacaccttcccaattgcaggtactatgcgccgcggtaaaaccgaagcagaggacctcgctattgaagaaaaactcattaacgacgagaaagagttggctgaacataacatgctcgttgaccttggccgtaacgatttaggtaaaattgctaaattcggttccgtacaagtagaggcgttacatatgttgcaacgtttctcccatgtaattcacattacatctactgtaagcggcgacattcaagacggtaaagatgctctcgatgccatcggtgctacattgccagctggcacattgtccggagctcctaaaattcgtgctatcgagattttacatgaacttgaaaaaagcccgcgcggtgtatacggcggcgctgtaggttacatcgatttctctggtaatatggacgtatgtattggcatccgcatggctatgaataaaggcggtaaggtctatgttcgcgccggcgcaggtattgttcgcgatagtgttcctgctagtgaatataacgaaaccttgatcaaaggccaatccatgatttccgcaattacagatgcacaggaggtagaataatggtactccttatagataattacgatagcttttcctttaatttataccaattagtaggctctatcgatccagatattaaagtcatccgtagcgatgaattaacagttgaagaaatccgcgcgttgaaaccagactatgtgatactttcaccaggccctggtagaccagctgatgcgggcgtatacgaagacctattacgcgaatgcaaaggcgaattcccaatcctcggcgtatgccttggtcaccaagccatcggcgaagtattcggcggcaccgtttcctacgcaaaacaagttatgcacggcaaacaaagcgtagccaaacaagtacacccatccaaaatccttaaaggcgtacctgaacaattcgaggtggctcgctaccactccttggcgattattgacgaaaccatgccaagcgaactcatcgttacatccattacggacgacggtgaagtaatgagcgtagaacacaaagactacccaatctacggcgtgcaattccatccggaatccatcatgacaccaaatggggaacaaatgattcgcaatttcttatctaagtagtaccaggaccggtattgtcttatatacatttgtagtcgagatggaggccctaaagcctccaccggccagatctgtccctgcgggacagggccaaagtcgttttaggaccaccatctcgacttcatctttatttaaatccaaatccggtcctatgaccacttttaataaaaattgcgaatcatttgtttccctaaacgtaaaaggaggaaaacggcatcgccgttttccttcccagcgccgcagaaacatttttaaatatttaattgttgttcattttgatagcagtgtaagcaggtagtagggcatatagaggactaaatgtcgtagtattatggtggattcacagggttctagtcccgactttggccctgcgaaggccgcaggccgaagtcagacccggtcggtggagggaataggtccctgtgaatccacaagcgatatgaatgagagtctatgccctattaccgttgaacagaagcaaaatgaacaacaagtaaggagttataaatgatccaagaagcattatataaagtaacacatggtcaagatttatcttatgaccttgcaaaggatacaatgaacaagattatgagcggagacgtagcagaagtccctatggctggtttcttatgtgctctagcagcaaaaggccctactgtagatgaggttacagcttttgctgaggttatgcgtgaaaaggctggttctgttccgcacgagcaaacagtagttgaaattgtaggtactggtggcgatgaagcgaatacattcaacatttctactacatctggctttatcatttctgcagcaggtattcctgtagcgaaacatggcaaccgcagtgtatccagtaaatgtggtgctgctgatttgattgaagcattaggcgctaaattagagcttaatggtgaacaaaacgaggcagttctcaataaagccaatatgtgtttcatgtttgctcctgtatatcaccaagctatgaaatatgcaggccctgtacgtaaagcgttgggcgttcgtactgtgttcaacatccttggaccgttggcgaacccagcaggtgctactgttgagttgatgggcgtttacgataaatccttggtagagccattggctcatgtattggctaacctcggtgtgaaacgcggtgctgtggtacacggcttcgatggccttgatgaaattacggctaccaacaaaacgtacgtatgcgaaattaataatggtgctttcacaagctacgaattcaatcctaaggaatacgggtttgactatgcagacaaaacagagcttgaaggtggcgacgctacggtaaatgctgagattactcgccgcgttctcggtggtgagcaaggtggtaaacgcacagctgttcttctaaacgctggtatggcgatttaccttgcgaaagagggccttacattagcagagggcattgaagaggcgaaaaacatgatcgattctggcgaggctcttgctacaatggaacaatttgtgaaagcaacacaagaggtataaccattgattttagatacaattgtagaggctaccaaaattcgggtagcccaagaaaaacagatggaatcacctgaggctgtaaaagcagcggcgttggcgttaccatctgatacaggatttccttttgaagcagcccttcgtcagcaagactttaacttcatttgcgaagtaaagaaggcatctccgtctaagggaattattgctgagcactttccctatttagacatcgccaaagaatatgaagtggctggtgctgcggctatctctgttttgacggagccagacttctttaaaggtgataaaaaatatttgcaagaaattgcaagcactgtcaaaatccctgtacttcgtaaggactttatcatcgatgagtaccaaatctaccaagcaaaggtatggggcgctagtgcaatcctattaatctgtgcatgtttagatgtgccaacattgactaagttccgtgagttagcggactctcttggtttgtcctccttggttgaggctcacgacgaaaacgaagtacaaatggctattgattgcggtgcacgtattattggtgttaataaccgcaatttgaaagacttcactgtagatgtacaaaacagtgtgcgtttgcgtaatctcgttcaagatgatgtgatctttgtatctgaaagtggtctcgaaacgcccgaggatatccaagtgttgcgggataacaatatcggcgttgccttgatgggggaaacctttatgcgttctcctaacaaggtggaaaagttggcatatctctatggtccgacctactatacgccaaaggttaagatgtgtggtatctccaaggttgaaacaattcctgctgtagtggaggcaaagccagactatatgggattggtatttgcaccgagcaaacgacaagttactgtggagcaagctaaaatattgattgaagaactacataagcaatgtataaatcactatgacacaaaggtagttaaaacagtaggcgtttttgttaatgaaacattagataatcttgttcgtattgccgatacagcgaatcttgatgctgtgcaattgcatggcgatgaagatgaagctttcatccaatccttaaaagaacgtactaatgtagagatttggaaagcgattcaaatccgcactgctgcagatacagaaaaatggattgatagcagtgcagatatgcttctctttgatgcatatcataaagatgagaggggcggtacaggagaagtattcgactggtcctctttagatgcgtttgaacgtccattcatgctagctggaggtatcgacagtacaaatgtagctcgtgctattcggacggttcgttcatatggtattgatattagcagtggcattgaaacaaatggtgtgaaggacgatgagaagattacagctttcaccaagattgtgaagagtataggaaggtaaagttatatgagtgaagaaagacatggctattttggtgccttcggtggtcaatttatgccagaaacattgatgaatgcagtcatcgaattggaagaagcgtacaataagtacaaagatgatccagagttcgtgcgcgaacttgaggatttacataaaaaatatacaggtcgtccatcccttttgtattatgcagaccgcatgacaaaagatcttggtggtgccaaaatttatctgaaacgggaagatttaaaccatactggttctcacaaattgaataacgtaattggccaaatgctattggcaaaacggatgggtaaaacacgcgtaatcgctgaaactggggctggtcaacacggtgtagcaacagctacggtagccgcattgatgggcatggaatgtgaagtattcatgggagctgaggactgtgaacgccaagcgctcaacgtatatcgcatggaattgttgggcgcaaaggtacatcctgtaacaacaggtactagcacattgaaagatgctgtatccgaagcgatgcgcgaatggacaaatcgtatgtccgatacacactatgtgttgggctccgttatgggcgcgcatccattccctatgattgttcgcgatttccaatccatcatcagccgtgaagcgcgtgaacaaattctcgaagcggaaggtaagttgccaacagctgttatggcctgtgttggtggcggctccaatgcgatggggatgttctataacttcattcctgatgaaggtgtacgcctcattggttgtgaagcagctggtcacggcgtagatacagatatgaatgctgctacgatggcaaatggtacagtaggtatcttccatggcatgaaatcctacttctgccaagatgaagatggtcaaatcgcaccggtatattccatttctgcaggccttgattatcctggcatcggacctgaacatgcgtacttgcgcgacagtggccgtgctgaatacgtacctgttacagatgatgaagcagtagatgcgtttgaatatctatcccgcttagaaggaattattcctgctattgaaagtgctcatgcggtggcacatgcacgtaaaattgctcctaccatgagtaaggacgatattattattatttgtttatctggtcgtggcgataaggacgttgcggctatggcgaaatatagaggggtggatcttcatgagtaaaattaaagacgctttcacaaagggcaaggcattcatcccatttattagtgctggtgaccatggtattgagaatacggaacggtatattcgcatcatggtgaaagctggcgctgatatggtggaaattggtattccgttctcggacccgacagcggaaggcccagttatccaagaggcaagcacacgtgcattgtctacaggtgtaaaaattcacgatatcttcgatatggtacgccgtttgcgtactggtgatgatgcggtgacagtgccattcgtattcatgacctatttgaatcctatctatgtattcggtcgtgaaaaattctttaccctctgtgaagaagttggcatttctggtgttattgtgccggatatgccgtttgaagaaaaaggtgaacttggaacaattgctcataagcatggtgttgaagtagtatccttgattgccccaacatctgaaaatcgcatcgaaatgatcgcaaaagaagcagaaggtttcgtgtattgtgtatcgtccttgggcgttaccggtatgcgtagcgaaatcaagacggatattaaatccatcgttgaaaccattcgtaaatacacagatattcctatagccgttggcttcggtatttccaagcctgaacaagcggaggctatggctcgcgtatctgatggtgctatcgtaggatctgctattgtaaaaatcgtggcagaacatggcgaacatgcagaccaagcactatttgactatgtacaatctatgaaacaagccgttttaaaggctggtgcataatatagttgttatataatatataggcaatatagaaataagacctatctagagcgaatttaccatattacatctatgttgatataatatagtagagtcaagctctgttgataggtcttatttttatgtgagattttttgctcattgtagaatacatatgatatttggtatcatgaattcagatatatcgtttgagaaaaaggatgtttaatgatacgacaattagtaattgatacaataaaagataatattatagatcggtattgtgatttttctggcaccatttctcggggcgcattttggcgatttatgctcgttgaacatttgattgttggtgtttgcttagccgtgctaggtttactgtccctgtatagtgccctatttatatatacaataggcatagtttttgcgctgtggtttatttcgattatggcccttacattgcctaatttgggtgctatggtacgtcgcttacatgatacaaataatagcgaatggcttttgctattagggtttattccctatataggcattctaatcgttatcgtattattgctgcgaggtacaaagaaacatcctattattgaaagctcagttgaatcctttgaagaaatagatttatttagtgataacgcggtggataatccgcaaaacctaggtatattaagcaatgtatctcatacatcatatgggaaaataagtattattgctgctgtttttcttactattgttagctgggggattgggatatatagtttttcctctgctgcagataaggaaatcgatgcgtatttacagatgcaacctggtgcgtttatgattatggcacaaaagaccttaggtagtagtacagctgttgaatctgctaaacaggttgtaataaattattatacatatcttaataaggaacaatatcaagaggcatatcgtttattggctcatcgagaacgtgaaaaatatggcacctatgatcaatgggttaaatctgttaaagctactcataatcgtcaaatgtcttcgctccgtttacaagctgtgttgcgagatgatgacgatgtagatcatatttcctttgagctgactttcacagataaagcctatcctaatcaaatgttcgtcaagatgatatatgagcatgatacgtggcgtattgagtcgattgtgccgtacgatcaaaaatatgaagagcgataaggagggcctatgaatcagaatatgatatatgatgtaagttatatggatgcccttaaacgtggattcaagcaatatgttaccttttctggtcgtgctagccgcagtgagttttggcgttttatggtgtgccgagaaattattttagacgggctagctggtttcggtcttatcgtagatatggtgctcggcaatacatcggctgctagtgattatgcaatggtgctgctcgtcatattacagctcgtattttttctacccagtcttgctattacctgtcgtcgattgcatgatgttggaaagagcggattaacatttcttttagtatttattcctattgttggtatctttgtgctcttatctaatcttgtgaaaaaaggtgacgtatccatgaatgtgtatgggggaaaaacagggtatacctgtgttacacctgttatggagcaacagttaggcctagagcatacgcctactgtaagagaagatattttgatgggtgcggtggctattattttatacgtttggatttttacccagcagtttgttgaaagcgcatgggtatcctttaatgctagaggcatattctagtcaaacctcgttttaccatttggtaagacgaggttctttttatatgaaaattttatgaaagtttaaatgtggatttattgactatattgaaaaatattgtaaaatgaataatagatgaaactaaataattcgaattagatactaagtattatgtaaatcatattgtagaaagaggttcggcatgcgtgcttgtccaaagtgtggacaaagaatacctagttcagagcgttattgcccgtattgtgggcatatgaaaaatattccattaccacttgatgcctatgaattgggttttatagaaaattttaaacactgtgtggttcataaatatgcggattttgagggccgtgctagtcgcagtgaatactggcattttatgcttgtgtaccaattaattatagccattatattatttatatgtgctgctattagttgtgtaacacctgtatcgggaacaacgggcgttggactaggtttggtagtcctttttattttgtccattggatttatcataccaggtgtagccgttgctgttcgacgtttacatgatcttggttggtctgggtggcctgttctattgggactcattccttttgtcgggattccggcagtattaatattaatggccttgcctggaaagaccgcggctaaccggtttggaaatccaacaggggtagaagtcattacaaagcaaatggcacataaatatggatttattgatgcgacgccatctacaccattgactataatacttatagtggtgttagttgtattatggttactagtggattggatgttagcaaattaaatatatgtatagagcattttgattaaaataaaaggtctgtaaaatgtgaaaaatcgcattttacggaccttttttatttaataattattgaattgtaataccgtgaatttcttgcgctaagcgttttaaagcatctacagtacgaacgccaggtgtgatttcagataattttacacgaatgaaatgattttccttaattgctgtaatatcttgcaattgaggattagattttaatttagcgattttttgttggaaatcgtcatcattacggatagagttaccataatcagcaataataatatagtctgggttttgtgcgattactgtttcccaagagcctttagcccaagttttatccacaccgagaccgctcataacattatcagcaccgattaaacgaaggatatttgtagtataaccttcaaatgctgtgaacggttgaccatcctcagaatcatagataaatacgcgttttcttgggacatctttcaattgtgcttgtacctttgaaagtgtgtcacgttgagaagtaacccattcattagcttttgcttctacaccaaagatttttcctagcataatcatgtctttaaaattagtttctaaatcggctttagtggaaagcatagattctggaatccaaatattaacattatttgcaatcattttgtctgcaggaattgcgcgtttactgaacgagtcaggccaacctgtagcgaaatcaggtttaacactcatgaatacttcgtaggaaggccatttatcagacaaaactttcactttgtcgtactcaccttgtaaaggtccataaatttcttcctctttgaaggcggtaccggccattttgtcagaaagaccaagttgaagcatcatttctgtggttgcttgggacatggatacagcatgtgtaggaggtgcacttacggagaagtttgtagtagcgccatcaaatgtttcgctccagctagcgattgcttgtgctgtttgtgtgttttgttgggacgtagtgccgcagccagtgaaagctagtgttgtgcctgccaccaatagtcctagaagggtaaagcgttttactttgtttaacattataatgtcctttctgtaaaaacagtacgtgaggaagtcctcaacataagtagattaactatatacctgcatatagctatatattttttagcgttaaacgctataaaatctaatattgaatacgataaataccgtcttctgtctttgtggtaaagggaatttcaaatacaggttccaatagctctggtgttaacacctcttgtggagaacctgtttttacaatgcgtcccttattcattaatacgatattatcacaataggtggctgccaattgaatgtcgtgaagaacgacaataaccgttcctttgaatgtttgcaattctttcattaaagccaatttatattttaggtctagatggtttgtaggctcatctagcaataatatggtaggttcctgtgttagggcttttgcaataaatgcacgttgtaattcaccacctgaaaggtgttgcacttcttcgtttgcaagatgtgaaatacctatatgctccatataggattcggcaatggctacatctcgccttgtatagttcccaaagcgtgtcttatgaggatagcgccccatgagaactatatctttcacaagaaaatcgtcaatcatagcatcatgcatttgagataagatggatacaaattttgcaaatcgtgacgaatcgattgactctaacggttcatcattaagggtgatggtccccttagaatagattgattttgataagtgctttaacaatgttgatttcccgcacccattagggccaatgatggctgtgattttattagtgggaaactctaccgatatatcatgtaatacggatcgagtaggatagtcaaagcttaagtgattaactgtatacataaatttcctttgtcctagaaataggattaactaatccttgtattgtacttagccgatatttttatatcgtttcataataatccagataaataatggggcccctaataaagaggtaagaacaccgatagggatttcttctgggctatatagtgctctagatagtacatcagaccaaatcatgacgatgctgcctatgagcatgctaaatatcaaagtatttttatgtttaggaccacctgtaatacgggcgaggtgggggataataagaccgataaaaccaacgacacctaccttagatactaaggttgcaatcactatggatgatgttataacgatggataattgtaatgttttaactgaaagtcccatgttggcagcctcttggttgccgaggagtaagacatctaaatcttgcttataaatgtagatgaataaacaaaatagagcgacaatgatggctgataatggtaaatcttgccattggatgcccgcgaaactacctaataaccaaaacatggcacttcgtacttgtgcttcatgtttggcaccataaataatcatcattgttaacgctgagaaaatgcctgtcatacccatgccgatgaggataagttttacgggactgttacttttaccaacacataataaaactaatatgatggataacatggcaccaaaggaggcaaagaaaggcgtattgtatgctcctagtaacggtagacctccacaaatgatggcgaatactgcgcctgtactagctcctgatgatacacctaatacgtaaggatctgctagcgcattgcgtgttaccgtttgcattaaaagacctacagcagataagccgatgccagttaagattgaatataataggcgaggtaagcgaatatcccacaagattgtgtcggtcatatgagggatagaaaggttttgtcctcctaagtgtgaggagagactatttagtacatctgttaaggggataaaggtagatccaaactgaagagatgtgactagagatacaattaatattgcactcaaaattaaaattttaatcgtatattgcatgatgcctcagaataatacttataattacattaacttatactaatattagtattagtatagataatgctcgatgtaattacaatagaagtactggtataggtatatagggtttcgtattaaatcataaaaaatctgatagtagtctattttatacatgaaactaaaagttatggctactcattcaaaatacatatgacttaaaaggtcttattacgctttgtgtgaagctcttttaattgactaagtataaagacctttttataatagttatattactatactatagtttgatagtgggtatattaattcctagctaatagtaggaaattagagtggctttatagtatgttctataaaatgatataccttaccatatacaaggagatgttacgatgaagtttaatacaaaatgtgttcacggtagtggcaaaccagatagtacaggggccatctctccagccatttatatgtccagtacatttacacatcctggtttgggtgaaacaacaggatttcaatatacacgtgagtctaacccaactcgtgatcgccttgaaacattaattgcaggacttgaagaaggtactgatgcaatcgctttttcttcggggatggctgctgttgatgcagtattccatttgttttcccctggagatcatgttattttaggggatgatttgtatggtggatccattcgattatttactaatatctacgaaaagaatggtgtcgaatttacctatgtaggtacatctgatcttgatgcagtgcaagcggcttttaaaccaaacactaaagctgtgtacattgaaacgcctacaaatccgatgatggaaattaccgatgtacgtgcgttgagtaaaatggcacatgatcgtaatgcacttgttattgtagataatacatttttaagcccttatttccaaaaaccattacatcttggtgcagatattgttgtccatagtggtactaaatttattggtggtcatcatgatgtaatttctggatttaccattgtaaaagatgatgaattggcagctcaattgcgccttatttataagacagtaggcgcgtgtttatctgcctttgatagctggcttgtcattcgtggcatcaaaactttggcgctccgtatggaacagcatcaaaagaatgccatcgctctcgcagaatggttgaagcaagaaccgaaggtaacaaaggtattattccctggacttccagaacatccaggctatgaagtgaacaaatctcaaactactggctttggcggtatgttgtcctttgaagtagatagtgaagagactgctaaacaagtgttagaaggtattcaattgattcaatttgctgaaagtttaggcggcaccgaatccttgttgacatatcctgttacacaaacacatccagatttaaaacctgaagatgcggaacgcaaagggattacacgtcgcttgttgcgcttgtccgttggcattgaagacacagatgatttgattgctgatttagcacaagctttcaataaataaaaggaggctattatgggccgatataattttgacaaaatcgtagatcgcaaacatacaaagtctctaaaatatgattttgctgtacaacgtggtaaacctgctgatgtattaccattttgggtagcggacatggactttgaaattcctagtgaattaaagcaagtcttgttagatcgcgttaatcatggtattttcggatatacggaatctgatgatgcatatttcaatgtactaaaagaatggttcgctagccgttttaattggaatatagataaaaaatggcttgtaaaaactccgggcgttgtatttgctcttgctatggcagtgcgtgctttcacaaaggaaggggaaggcgtactcattaatcaacctgtatactatccatttagcatggtcatcgatgataatgatcgtaatttgattaacgttcctttaattcaaggggcagatacatatacaatcgattttgaaggcgtagaacgcgctattgttgagcataatgtaacattattcttgctttgtaatccgcataatcctgtgggccgcgtgtggagcgaagatgagttaaaacgtcttggtgatatttgtattaaacataatgttattattattagcgatgaaattcacgcggatttcgtatgggatggtcacaagcatactgtttttgctaatcttggtgaaagctatgcggagcattgcatcgtttgtacagcacctagtaagtcctttaatattgcaggtttacaagtatctaatattttcatccctaatgattccttgcgtcgtagatttgtcaaagaaatcgaccgtgcaggctatagtcaattgaacacgatgggacttgtaggttgccaaggtgcttatgaagtgggtggaccatggcttgatgaattaaagggatacattcaagggaatattcaatatacccttgattattttaaggaacatttgccaaagcttcacatgtatcgacctgagggtacgtatctcatgtggtttgattgctctgaactgccattgacaccagaagaacgtgaacggtggctacttaatgatgcaaagctatggctggatagtggctccatgtttggtaaagatggtgaaaagtttgaacgcatcaatgttgcctgtcctcgtgcaatattgacagaaggtttagaggcattgcgtcgcgcttatgtcgctaaagggttttaggaggtttcacaatgccgattaaagttattaagaatttaccggctataacaaagttagcacaagagaatatctttgtaatggatacggaacgagcggaaacacaacaaattcgtccgcttcatattttgcttatcaatttgatgcctacaaaagaggttacggaaacacaaatccttcgcgctcttagtaatagcccattgcaagtaaacttaactttattgcatacagcatctcgaaaatctaagaatgtagatgaagaatatttagagactttttaccgtacctttgacgaagttaaagatgagtgttttgatggcttgattattaccggtgctcctgtagagttgatgccttttgaagaggttgactattgggatgagcttgtagaaattatggattggagtgaagaacacgtatgctccacgttctatatttgttggggcgcacaggctggcctgtaccatcatttcggcattaataaacaaattatggatactaaattgttcggcgtttatgaacatgatatctataacgaccaaccggttctcttacgaggttttgatgaaaagttctggatgccgcactcccgccatactacagtttcattagagcaaattaaagcacatagggaattagaattgttagctggttctgaaccaactggggctgccatcgtacgaagcttagataataaacacatctttgtttttggtcactccgagtacgattgggatacactcaatcgcgaatatgtacgagaccttgctaaaggtgaagacattgcggtaccagaaaactatttccctgatgatgatccaaaacaaaaaccaatcgtaagatggcgttccgtaagcacattgctatttacgaattggttgaactattacgtataccaagaaacaccatatattattgaacaaattcagaaaatgaagtttgaacgagataaaaattttggtgcttatatttaaatgcagagtatgtaagtgaaccgaatgtgttcccaaagactccaccggccgggtctgactccggcctacggcctacgcagggccaaagtcgtctttgggaacgcattcggttctttccatatcagctataattttaagatgcacccaaattttagtagagcccgaagtcgttttgagaactggtaggttcttctcatctcgaactttaagttgaaggcacccaaattttggcgccctttgaatatgttatatatgaagaaaaccaaatcggtttccaagggcgactttggccctgcgtaggccggaggccggagtcagacccggccggtggagtctttgggagcgtattctgttcacttacatactctgtatttaaatataagcaccaaaatttttgccatagcttatagttatggagaatgtattataaaaagtggtagacatattttttaatacatagtaatataataggcataagaaatgaagtttattcctttatatgaatgggagttgaatttaatgagcaaacaatataaatttgaaacattacaattacatgcaggtcatacggtggatccaacaggttctcgtgcagtacctatttaccaaacgacatctttcgtatttaaagatgcagaggaagcagctggccgttttgctttgactaatcctggtggtatttattctcgtcttggcaatcctactactgacgtattggatgcgcgtgtagctcaacttgaaggtggtgctggtggtattgctgtagcatctggttctgcagcgattacatactccattttgaatgtagcaagcgcaggtgataatattgttgctgcatctacattgtatggtggtacatataacttattcactgctacattgcctcgtttgggtatcgaaactaaattcgttaatcctgacaatttggaagagtttgaagcagctattgatgacaacacaaaagctgtatatatcgaaactatcggtaaccctggcattaaccttatcgatgttcaagcagtagctgatattgcacataaacataatattatcttaatcgtagataatacattcgcatccccatacttgttccgtccattagaacatggtgcagacgtagtcgttcactctgctactaaatatcttggtggtcatggtacaacattggctggtgtagttgtagagtctggtaaattcgattataaagcatctggtaaatatcctagcttcgctgaaggggacgaacattacaatggtttagtatatggtgatttgccaattcctttcacagtaaaaatccgtgctcaattacttcgcgatacaggcgcatgcattactccactagcagcatggcaaattttgcaaggcattgaaacattgtccttgcgtgtagaacgtcacgtagaaaatactcgtaaagtagttgatttcttgagtaaacatcctaaagttgcttggattaactatccagaacttgcagatagtaaatataaaccattagctgataaatacttccctaaaggggttggtgcagtattcacattcggcgtaaaaggcggcaaagaggcaggcattaaattggttgatgcattgcaaatcttctctaaccttgctaatgtggcggatgctaaatctcttgttattcaccctgcatccacaacacatgcacaacttaacgaagaacaacaaaaatctgctggcgtaacaccagatatgatccgcttgtctgttggtcttgaaaatattgatgatattatcgatgatctttctcaagcattggataaagcttaatcttaacttctaaactccttaaagcataactccaaaaacctatagaacataaaaagaaaaccttgtaataagaggctgtaccaagatgtcgtgacataatttggtacagcctttttgtcctataacccaaagaaaaagaccttgaattcaacgattcaaggtcttttaatatgtgtatatgtgtgtttaaaagggtttgttttatgtgtgtatagtttttatgagtgtttagttttatgagtgtgttaagaaattggagagatatattatatagtggttaggtgtatctatataatatatgggttatgcttagtattttgtagtttttactttagcactgagaactttaccggaaatagcatcgatcttaacgtctgcttttttgtcgccgccgttagtcatgtctagtttgtagacaagtttgttgccgtccatttccaattcccattccattgtttggaaatcgctgcctacgcgttcgatagcttttgtttcagcagattctggtgtgatggagttttgtggattaaagctgtgagatttctttaatttgttccatgcactaatggattttgcttgattggaaacaacttgacctgttgcttcatcgattttcatttccactttttgtgtcttagtatatgcttctacttcgtaagttggatgatgttttgcatcataggagatagaagttaccattgcatctggatagtagcgatgtaatgtagtaacagcgcctacgtagtcgatttcgctactttgcattggagatgctacgctaccaacaccattccaggaactaggagctgggtaagcaggagctgcagatgctacgcctgcaatcaatacagtacttacgccaagagcacataatactttagacaaattatttacttttttcatgttaattacctccataaaaggattttgctcaaaagcaattgtgcaagtagattttactcaatctacttatacataatttaatatcataaaatgaatataaaatgaaaaactaaaactatatacttatttttaggtatatacataatatattcgacatacattatgtatatcctctttttttatttgcatattttgcataatgtaaacttaatataagtatatatggttgacataaataaaatggaatggtttaataaccttgaatagatatgtagtttgtttagataggtttcttttattctattaatggaggtataccatgagttccatttccaatcgacgtctcagcacaagagagttgacaatgacagccttatttgtaacattaattacagccggtgcatttattcgtgtgccacttccaaactgtccatttacactgcagattttatttactacactggctggtattatattaggcagccgccttggtgccattagtgtagggatctatattatattgggacttatcggtgtacctgtgtttacatctggcggcgggccaggctatgtattgcaacctacattcggctatttgattggatttatggttggcgcttatgtggtggggcgcttcagtgagctttcaccaacacattctgttaaaacattgctcattggtgctattatcaatctgcttattgtatatggttttggcatgatttatttatatatgataatgaatgtatatttagggacacctattggttggtgggctgttatctggtcttgtttcttgattcctgttgggcctgacgtatttttatgtgctgtagctgctgtgatggggaaacgtattataggccatttgcgataatatatacaaaatagtaatagagggctatcacatttgtggtagcccttttactatattatggatatacatatcctaaaatttcttgtgcatcttttgttttgttaatttctatgtatggttgcttgcgcccgtgaaagtctcgtgtggatacagtgccttctacggttacccattgtttattgctataagaatccccatcattcttatgcattgttagaccaataggggcgacgtctgcaatacagcaagccatggccatacgtgaaagtgtaaactcattggattttaatgtattgtcttctcgattaacataacctgtcatatagattttgtaccctacatattcctctggtttagaaccgagtgcaacgatggtgcgataatagttatccgagtttaatacgatttcctttttggattttgaaatgccaggatctttggcctcattattgattgtaataacttcgccaatatcgtcttgagaaaaattaaaatcattagtatcttctgtggcggccgtatttccagttacttgtacagagttaggcgataaaattggtggaaccacaaataacacaagagggattatgattggtgtaatagagcgccaattatgtttatattgtttatttggggaccaaaggattgaaataatgcctcccaataatagtgctatacctgctaagagtaaaaataattcatatcgaggggccacatataatttatattggcccgtaatgattagatataaaaaactaatacctaatgccgtatatagcagacccttgatgacactgagtatgtctttgtttcgtagttctgataacatagtctgttctccttatacattaaataaaaattgaaatagcaatgtcatgatatacgtaataatacttatagtaataactaagcgaagtataaatgatgttgagatatactgacgtaacatgtatacgtttttgatgtcaatcataggacctaaccataggaaaccaagaactgctgatataggaaataaattgcttaacgaacggcctataatggcatctgatgtagaacatagggagaagaggaaagctaaagctagtaataatgcattagcaataggtgtggctacatcgagtgaaccagagaagaaggtaggttttatccatacttggaatagggctaatgtgaaagctgctgcagagaagtaaataagtaattgactgaattcacgctctacgtgcaatagaaagattttctttttattgccttcttgatttggtgaaccatactgataatcttttggctgaggtaaattgttagtgatggtagataatttgtgtggtttccatttaaatgtgagggccaccatacatgcgattaatataccaccaattatgcgagctagtattatttgtggcgtatctggaaatgcataataggttgctaataatgcgatggggttcataataggacttgcgagcataaacaataatcctatatgttgagggataccacgctttaataatgcattaaacataggaatagtagcacaatcgcagataggtaatacaagaccgctaccaatggcgatgccatagcttttaatagagtctgctttcagataacgcattagccaacgatccggtaccaatagtgtgatagcagaagaaatgatggttcctaacaataaaaacggtatcccttcaaaaataatgcctgatgcaatggccaaaacttgatggatggaataggaaatgctatgacggaatacagtgaccagtaatatatataatgtcaatatagccacaataccgtacaacgaccatggccatatcggtttagttagtttattgtggatgtcttttgtagtgggattgactaatatggaacattcgggattataggattgtaagagtttctttactgctttggtttgtgtcgtatcattcgcatataacataatataatcggcgctgtatagttgcgatacgactctatcccctagtacctgtatcatagatgttatactgttgctgtttgctgtgtagatgacgcgttctagatgacagaattcttttagaattgaattgaagaagatgcgttctaattgttgaaatgaaaacatgccattccattcaacccatatttctttcggcgttgtcgtagaaagataatcctgtatctgttgtactacatgatgtagattttcttctatatcatctggctcaatcgataaaggcttttttataaactctgtattacctgtttcaaagctgataatttctgtagagccaagtttttttcgttctcgtagctctatattgattagggaggttttaccagagcctaataagcccgttacgatatatacaggaatcatgatgcactacacactttctcttgtatggatgaaatgtctatatcggtgccaataacaactagatggtagtcctttaagtgcgtatctgtaagagaacaggattggagggtgtattgtaattccataggtcctgaagtggtaggaacgatacctttaacacgtagtactgtagaaggtaatttattacaaaagtcaatccattgcgtaagagcgagggattgtagattatggaatgtatagctcacaaaaggttggtgctcatgatggtggccgtcatggtcatgatgactgtgattgtcgtggtgagcaccgttgtaatcctcactgtcgttacatgtatggcaactgcaggtttcggaatcatgttcatgtgccttatgagtattagattttagttggtgtatatcctgttgaagtgcatctacatcggtataagttggtgtatgtggtgctaattcaacgatgagttgttttgctttttcaacctgtttttcatcctctgtgtgagtaagtagaatagcataacagtgttttatttggtctttaaagaagggaccaaagttcttaattgccatgggtgcctgcatagcatctacgattgtaataatcatgctgatataggctttactggtgatatcgtcatcgtcacaagtatataaaatttcacttaatttgctcaccccagatggctctatatagatttgatcgatatcttgcgtagatagaatatcgattaaggcatttttaaagttgccttgcagactgcagcaaatacaaccagatgttacttcacgtacagttgcgcccgatgcggataattgctttgcatcgagactggtttcaccaaaatcattttctataattaatatacgttcattggtgttacgacagtttaatatatgttgtagatacgttgtttttccggatcctaagaatccggatatgatcgtaattggtatcataatacgcctcccttgtaaatgtaaacatagtatactactcttacataacatataaaaatacccataagggtatgaacaatagttcacaaagttaagtaataagcgatttataagaaaaattgataatattatactaatatgagtatatgtgaacatgtttatatatttataacgttgattttacaaaaaagcgtatgcctcataggatatatatgagtacatacgcttatttgaataaatattattttgtaaaattttgaaaaattattgtaatttttctagtaatgctttaaggaatacatatacatgttctacagaaggtagatgtacgcgttccatatttgtatgtgggctaatgattgttggaccaaagctgatcatttcagtatttggtaaaacattctttaataagccacattctagacctgcatggactgcattcacgcgggcaggggtgtcggacatggtattgtaaagtgcgataacttgttcttctagtttagaacctttatcgtattcccatgcaggatatccgccgctgcgggtagcagaaacgcctaatgtatcagcaaggagtaataattttttagttaagtattctaagctgtttttattagagctacgaactgatacgaggatgtctatcgtatgtgtgccttcagaaacaatagcgagattatctgatgtttctacaagcccttcgatggtttggctcatagagtgaaccccatcttctgcaagatagaggtaggatattaaggcttctgccgtatcatcagcatacactgttgccggtgtaggaatttcttccactacgaatgttaaatcaggatctttgatcgcaaattcatgtttgtattctttttcgtagaatttgataagggtcttaatcgcttctatatcctcgttgcgtacagacatggttgcaacggctttagatggaatcgcattatgtttaacgccacctacgaaagaagctagattaaaggaatattgtttttctaaatcataaagaacgcgagcaagtacttggtttgcattagctcgttgttcgatgatttcgataccggaatgaccaccctttaaaccttttacagttagtgaaagccctgcatcataaccaggtagattattttcgcgcaatagtgggatggatacattaacgtggcagccgccagcgcagctcacgcagaactcatgttccacttcagtgtctaagttgattagatagtcacctgttacttgatcttcttttaccgctgcagcaccatccatacctgtttcttcgttagttgtgaacaatacttgtagtggaccatgttgttggttcttatcttctaggactgctaaaatcatagcgccgcccatgccattatctgcacccaatgtagtgtcatcggcgtgcatccattcaccttcgatgatgttggcgattggatcttttgtaaaatcatggctggaatcatgaccttttacgcataccatatcgatatgaccttgaaggatgacggatggacgattttcatagcctggtgtagctggttttttgatgactacattccattcgctatcttgtgtagcttcgagacctaaattgtgagcaaaattgacaatgtaatcgctaatgcccttttcgttgccagatccacgtgggatttggctcatttctttaaatatttctaatacgcgttttgcttgaacgattgcgtccatttggcacctctcattctgaaaatatatcccatataattctaattatcttagttgctatgagattattcatgtttattcactagttaataagtaattattatctataatatagttatatcacatgtactatgaatagaaaagacgatgtatatagtttataatagtatcatgcgtaatgtataacgaacgcgctgtattatataccttttatttatataggatggtgaaagtatgcaacatgaacgtcgcaacattagtatgcttatggatctctatgagatgaccatggctcatgggtactttacgaaacaagacaatacagaccgcgttgccttcgacgtattttaccgtcgcaatccggacaaaggtggatttgctatctttggcggattggaacaagttttagaatacattttgaatcttcatttcgatgaggaggatatggcgtattttaaatcattgcatttatttagtgatgaatttttagagtatttgcgcaacttcaaatttaccggtgatgtatatgctttcaaagaaggtaccatcatatatcctaatgagccgattatgaccatcgtagcacctcttatcgacgcacaaattgtggaaacagcagtgcttaccatgattaatcatcaatcgcttattgctacaaaggcgaaccgcatcgtgcgcgccgccgatgggcgcattgtatccgattttggggctcgtcgcgctcacaatgtagatgctgctgtatatggtgcgcgggcggctttcataggcggtgtcaatgggactgccacagttctagcgggacaacaatttgggattcccgtaaatggtaccatggcacatagttgggttatgtaccacgattctgaatatgaagcattcaagtcctatgctgaagtgtatccggacagtgctgtgttcttggtggatacctataatgtattagaatcgggtgtaccaaatgccattaaggtcgccaaggatattttggaaccgaatggtcatcgattaaaaggcatccgcctcgattctggtgacttagcatatttagctaagcaagcgcgtcgtatgctcgatgatgcagggatgaacgattgcaagatcatggcatctaatagccttgatgaatatacgatttcatccttattaaatcaaggtggccctattgatatctttggcgtaggggaacgattgattacgtcgaaaacggatcctgtattcggcgctgtatacaagattgcaggcgtagaaaaaggcggcgtatgggaaccgcgcattaagatttctgagtctgtggaaaagattaccaatcctggattgaaacaggtatatcgcgtttataatgcggatggtcgcgctattgctgaactattgacattacctggcgaagtgccatctacagacaaaccatatcgttatatcgatccagaaaaaccgtggagagaattgtattatgaaaactgtacatttaaaaatatgcaggaactcatgattaaagggggcgagcaaatcgtaccatccccaacattggaatcgatacgcgcctatgtacaagaacaattagcccatgagatttggccagaagaacaacgctttgaaaatccacatcgtcactatctagatatgagccctgactattaccatatgaagatggacttattgaatcgtattggtcgtaaaaaataggagggcctatgcttacacatccagaacgaacaaaagaggaattagtggcgtggattcgggactattttgaacaaaatggacctgcatgttccgctgtagtcggcatttcaggcggtaaggattctagcgtggtagccgctctttgtaaggaggcgcttggtgcagaacgcgttgtaggcgtccttatgccaaatgatgtacaatccgatatagatgatgcaaaagaggtagtggcgcatcttggtattccctatatgattgtaaatattggtaatgcctatcgtgcattaacggaggctattgtacaaggcgagggtttttccaatgtaacgggccgtacagatttagcgcgagatgcagaaatcaatacaccgcctcgtttgcggatggccacattatatgcggtaggtcaaaatttgccacatggtgcacgtgttgctaatacatgtaatggctctgaagactatgtgggctactctaccaagtttggcgatgcagcaggtgactttagtccattggcgaatctcgtggttgaagaggtacgtcaaattggacgacttttggatattccgcgtcatttagtagacaaaacgcctagtgatgggctcagtggtcaatctgatgaggataaactaggatttacctatgccgttctcgatcgatatattcgaaccggcgaaattgaagatatacaaacgaaggaacgcattgattatctacaacgaattaatcggcataaacttgaattaatgccttcctttaaaccttctacattatgatacctataggaggataagatgactaagaaaattgcaatcattggtactggtggtaccattgcgggacaaggtgcttcggatactgatttgacggggtatacagcaggtgtattgcccttagaagaaattatatcctctgtacctggcgttagagattatggaccttttgtgtgcaatcaattttgtaatattgaaagttcagatataacgctatttcaatgggtccgtctatcaaaattagtacaaaaatgtgtggataatgatgatattgcgggtgttgttattacacatggcacggatagtatggaggaaaccgcgtactttttgcatcttactgtccatactgataagcctatcgttataactggttcgatgcgtccagcaggagctgtcagtgccgatggccctattaatctattgcaagctatacaagtggctcgaacaccagaatcatataataagggcgtactggtagttatgaatggctatattgatggtgctcgtgatgtaacgaaaatgaatacaactaacgtggcaacctttggtagccctaatgcaggtcatcttggtattgtacaagatggtatagcccaatactatatgtgtccgttgcgtaagcatacgatggaatctgagtttggcttgccagagaacgatgacttaccacgtgttgaaatcttaacctgttatgcaggtatcgaagaaattatggggcttgccatagtggcaacgaacccatcgggtttgatcttagctggcttaggccatggtacgataccgcaacctatccgcaaggtaacatccaatttaccaatacctgttgtacgcgcatccagaacgggaagtggtatagtatctaaggttccccaagatgtggaggcaggctattttgtatgtgatagcttatcacctcaaaaggctcgtatcttgttgatgttggccttacaaaaggaacgcacttgcaaggatttggaacgaatctttaaagaatactaacccttacaagcaattgtatgcggatgagacagatataaaaagaccctttgtgattattcacaaagggccttttgcttgtataaatcattcggtaccgatggcattttctaatgctcgttgtacacctaggtatacagctttggctaaggtgtcgccgaatagagaataggatcctgcatcagttaatacatcgccatttgtattgatagttaagatgatgccatctgtagcagttccagtagcggaggtattcgtttcttttgctaaactgtgaactatatgtgtattgtatttgggaaagtcctgggtactttccaccttccaatcttgtaatgctgctgttttagcctcagtaatcgtcatgatggctttcaccatcgcactatctgttaaggccttgttggtaaatacgaggatattaattgtgccaggagtgtggaattcaccatctttttcttcatagcaataacctgtacctgcacgatgggccgttttcttataaccaccagtgacaatggtttcaacgattgtatcactttcttgtaccattgtgtacgcatgaagggatggtgtagcagaggttaacagtgcagtgctgaaatgtacaggcacatcgatatgctcaaattcttgagctaaatagtttgctacagagccacctggtagatctttttctgtttcaatatggtaggttaattgttgattgcgtacacctaatgtatggtgaaagcctccatttagttgaccactgctcaaggaatagtgaatgtcgtcaaagagtacggttacagagttgtattctttagtgacatgaccgcccgttattaattcatctggcgctgtgtatggattattagacatataggactccctagtttatcattgttagatatagaatataaagctataataaaaggtaatattttattatcttcatataagttgtttataatacataatatttacatgtgaaattatatcatatgtttaccatagatttgagtaagtcaccttaagcattgtgggggtatacatgtacgaattcttagcaaccgcatcagagctgttatttaaagatgccaatgtattgttaaaattaagagaatggttttttagccaagccggcaatattttgcttgctcttattatattttttgtaggccgctatattattcggtggattaaaaacgttgctgttcgtgttatgacacgggccaactatgatactgccgcaatgggctttgtatctcaaattattaattatgtattgcttgtaggtttattattagtctgtcttaatcaagttggtgttcctacaacatcctttgtagcagctttcggtgcttttggtttaggtattggcttagcattacaaaataatctagcgaacttagcatcaggattattgattttaatattcaaaccatttcgtgctggacactatattgaggttggggacattatagggagcgttacatccatacagtttatgaatactattatcactacaaaggatcagaaacgggtgtacataccaaattcgattcttacatctcaatcagtaacgaattattcctatatgactgaacgaatgattccgtttgtttttgatattggctataacaatgatcatcatgaagcaattaagatattaaagaccgtttttgccaaggataaacgtattctaaatgctaaatatatggagattggtatttctgaatttggtgataactctgtgcgtatttctgcgtttgcagaagttaaaacgagtcagtttcttgatgttcgatatagtattatgtccgatgtaaaagatgcttttgataagcatggtatagatattccatatccacaacgtgttgtatatatacaaaacgcagatacttctacaggtgaaattaaaggaactaagaaaaaagtaactaccacgaatcaagaaatctgataaatcatgaatttacaagttaataatatgtagaaagagattgatatgagagatttaataatgtataggcacttagtatggcaacgttttatattggcgttagctttcataggtgccatgctcttaggtactgttgctcatggtgctgcacctacgccaccatctaccattggtgaagccgtggtactcattgatgcagataataaggagattttatttgccaagaatcccgataaatggatgcatccggcaagtacaacgaaaatggtaaccttattaacagcacttgagttaaaaggaacacaattagatgagttagcaacgattagtccttatgcaactagcatggaggaatctaatcttggtgtacatgtgggcgaccaaatcaccttggaaggtgttcttgaaggtatgatggtagcatctggtaatgatgcggctgtagtggtggcagagaacgtaagtgggtctgtagaaaattttgcgaaggatatgaatcgcatagctgctaaggcaggggctaaaaacagcgtattcctcaaccctcatggattgacccaaatgggtcatcattcaacggcacgagatttggctttgattgcagcttatgggatgaagtatcaaatgttccgcgataaggtggcgaatgattactataaggtgccatatcaaaatcgcacacctgaaacgattcgcactaccaaccatttcatccgcaataaataccctggtgctaatggtttaaagactggctttacaaatgcggcgggtgaatgtttgatcgcatcggctacgcgaaatgggcacactatgattgtggtgatgctcaatgatgacaaccgttggaatgaggccgttcagttcctagactatggctttaaattacgcggtgttatttaataatataactatttagttatacatactataaaaggtcctaccttctggtgggaccttcattgtaagggggatatgtatgagttcattttttgcttttttaaaacggatgcgctttattaaccgttggagcttgatgcgcaatacggaaactgaaaatattcaagagcatagccttgaggtggctatggtagctcataatttagcggctcttaaaaatgaatattttggtggcaacctagatattaacaaggtagccgtcattgccatgtaccatgaagtgagtgaaatctttacaggggacatgccgacgcctattaaatactttgatcctaagcttcgttccttgtatggtgaggtagaaaacttagcgcaagaaaaaatgctaagtacattgccggaacgattgcaatctgtttataaaccgtatattgtagatgctgaaacattgcctgaatggccgattgtgaaagctgccgataccttgtccgcctatatgaaatgcgttaatgaattacatgcgggcaatgatgaattcaaggaggcgcacgatacgattttggccaagttgaaagctctaaatatgccagaggtggacatgttcatcgaagaatatgtaccggccttgagtgagtccttggataaacttaattactataaaatatagtaggtagtattaaggttttgtaatatattcctgattgcgtatcaatatctttttaccgcgccatgagaaggctcgatggccatatttggctttgaattccttatttgtcatcgattctaattcggtaatatccacatagggttcgacagattgaaattcaataatgggtgttgtaggtaagtccttattatgggggcatacttcttggcacacatcacaaccgaataacaagggtgatttcctgatgatggcttgttcatcatcggtgagatcgccttttttttgcgttaaatagcttttacaggtggcgtaattaaatgcattgccatttagacattgacctaagcaggatgtaatacaccgattacagcccatacacgtatcggccataggcgtattgggttcgaattctaatgtggtgagcacagtaccgatgacgatataagaaccccaagttggattgataaagcatttgtttttaccgtagaatccaagacctgctaaatacgccatatatcgatcagctaagggactcgtatcgcaatggatagagaatgatgcatctggggcagtcgttttaagttcatctacgaggcgttgtaaatagtctgtcaccactagatggtaatcagtggcccacgtgtaacgggatagattcgtaggaccttcatgtggcacatgatagggaaatagacagacgatggcgctgtgtggcataaagtctgttgtgcctatcagtcgttcgtctatgtcggctggtgtgaatggacagggattggattcctgcaaaatttcacgggcctctatagggagtggccatgacgtggtgcccactacgggtatatgtaattgtttgcaaacttcttgtaattttatattgtttgtcatagatttacggtgtaatagttgttacaattatatatataagcaaaaataaaaggttttatggcaacattgctaatagtaaatggcttaagataatgattgtttttagtataccattgtgaggatagattatgttagcctttttgaaagtattacaaccgaagacggtggaagaggcctatgaaatggccgtaaaaaataagacggcaccaatgcttgctggtgggtgttggctacgattgggtcgtcgtacatggcctgcagtaatcgatatggcaggactagatttacgctatgttcgtgaagaagataacgaatttgttattggtgctatggcgacacaaggcgatgtagaacgatttgaaccattacaacgcttttgtggtggtgctgtagtacgtggtgtcaaagaaattctaggcgtccaatttagaaatatggctaccatgggtggttccgtggctagtaaatttgggttctctgatatcattcccgccttgttagctgttcatgcagacatcgtaacctataaaggtggtcgtatgtccatgaaggattatatgaattatcgggaacgcgatattttagttgaaattcgcatcactaaacgcgaagtgcctgttgcggttgaggcgttgcgcatttctcgtggtgactttccgtatttaaccggttctattcgccgtgatgatacaaactatgaagtctatatcgggacccgtccaggtgcgccacaattggctgagaaagctagtgccttgctttcagaaaaaggattagatgcattagatgaggcagcacagattgcatcagaggaattagtgtatcaaaagaattctcatgcatccaaggaatatcgcattgagatggctaaagccatggttcgtcggttagttaaggaggtggcacaataatggaattagtattgaatattaataataagaatgtaatcgttaatgtgccaacggatgaaatgctattaactacgctgcgtaacttaggctattatagcgtacgctgtggctgtgatacgacaaactgtggtttatgtactgtttgggtcgacgatgaaattacgctatcctgtgcatatcctacatttcgtgcgcccggtcatacgattacgaccctcgaaggtcttgaagcggaagcctcattattagcagattgtcttgcttctgaaggggcagaccaatgtggtttctgtactaccggtatgatgatgagtgctatcgcattaaagcgtagaaatcctaatgccagtgatgatgaaattcgagaatacttgattggtaatctctgtcgttgcaccggctatgagtcgcaactccgcggtgttcgtaagtatctacaaggaggtttataatgaagcacattggtaagtcttatgataaagtcgatgccaagggtatactcagtggtaaaccttcttatacaggggattttgtgccaaaagatgccctcattattaaggtattgcgtagtccacacgcacaggcgaaaattaaatctattgacacatctaaagctaaattaatccctggtgtagaggctatttttacctatgaagatgtaccgaacacgcgttttactttagcaggtcaaacctatccagagccatctgcctatgatgcgttgattctcgattctgtagttcgctatgtaggtgatgaagtggccctcgtcgtggctaaagatgaagctactgcattgaaggcgatgcctctcattaaggttgaatacgaggtgcaaaaaccggtgcttgatttacgcacggctatggaccatgaaacagtagttcatccagaagatgatattctcaatcacattccagtaggacaagactataaacgcaatatttgtgtatcgtaccataagcgtgttggtgatattgaaggggaacttgctaaatgcgattatgtcgtagaaggcacatatttcgaccaagctacgcgtcaatctgcaatggaaccattccaaagctttggctatattgatcatttaggacgtattgtcatcgttagctctacgcaaatcgtgttccatgtgcgccgtcatattgcacgagcactaggaattcctgcatctaaaatccgcgttattaaaccgcgcattggcggtggttttggatcgaaacaaacggcttgtaccgaattgatgacagcatttgtaacctggaaattacaaaagccatgttatttgctatatgatagaactgaagcacaaacttgttctactacacgtcatgctcgtgaatggtatattcgcgtaggagctacaaaggatggcattatccaagttattgacatggactccattaccgatgcaggtgctcatgcaacccactgctttacgacaaccacagcgggggaacataaatccgtgccattgtataacaaggcaaaagcggtgcattacggcacggaaggggtttacatgaatcatacgccgggcggtgcctttcgtggctatggcgctacagaggctttgtggcctttagaatgtgcagtaaaccgtttggcggacgaaatgggaatcgacccagcggaacttcgtcaaaagaatctaattgctgccggtgaacgcagcttagtatataatcctgatgaaattatggattctggactattccaagaaaccgtaaataaggttaaggaaatggctcgttgggatgagcgtcctcatagttgggacattgatgagcgctatcgcggcggtttggggatggctcttgctttacaagggtccggtgttgctaatatcgatgtagcatccgtagaaattcgtcttggcgatgatggtaactacacattgtatacgggctcttccgatatggggatgggggctaatacaattcttacacaaatggcttgtgaagcccttggttgccctatggaatctatgacggttgtcgaatctgatacggatatcgtaccatttgatccgggttcatacgcatcgagcacgacctatgtaacgggtactgcggcgaaaatggcggctgaagaactgagagaaaagataatccataaattagcgcaatttatggatgttaaaccagaagatattgattttgatggcttagtaggtacgactaaggacggtacaaagaaaatgtccgttcaagaattagcgcctaagctattagtcggaactacatctgaacaattaacggggttcgcaacatggggtagtcacacctctccaccaccatttatggcgtctattgctgaagttaaggtagataaacaaacgggacaaattataccgttacatatgtataattgtgtagactgtggtaccgttgtgaatcctaaactagcgcgtgtacaggttgaaggaggcgcagtacaagctattggtatggctttgtatgaagacgttagatactctagtaatggtcgtttagaaactaataattttatgacctataaaattcctacacgtcaagatattggtgaattacatacagcctttgttgaatcatatgaggaaagtggtgcatatggtgttaaatccatcggtgaaattgttattaatacagcttgtcccgcaatacaacatgctgtaaaaaatgcagttggtgcggatattcgtacattacctatgacaccagagaaggtatttatggggatggacgagaaatataaagtataaccatttctacattcctaaagggggcctcgtgctatgacatcacaaacgcagtactggaatcgtcttatccaacctggcattgtcgcattggttggggctggcggcaaaacaacggtcttatctaagctagtcgagtatggtcggttgcaaggacaacctatcgtagtgacgactacaacacagttgtatgaatcacaagtggctcaatatgaacctatttatacaaaggatatcaacgatgttgatgaatattgtacaaaacgtattcaacaaggttattgtggtgcctggtttaatggtattacacgaactaaggttgatgctgtagattgtgaaagcatagatggccttagtgcgttacatccaaactggcaaatcgtcgttgaagcggatggagccaaagagaaatggcttaaggcaccaaaacatacggaacctgttatcccaagtcaaacaaagacgactataggggtggtgaaccttcaaatgttgggcgcatcccttgatgaagatcatgtacataatttagaattagttcaatccattgtacatcgcgaagaaggtgccattgtaacacctcatatgcttgctcaaatcgtgcttcatagacaagggctattccaatatagtaagggcgagaaaatcttgttctgcacgggttatgacacggtacaacatcgtattattgatgatttcataagtcatgtggtagatagtgatattacggccattgtgttggctgatgggtataaggctagttgtgaaattcgtcgtattattcaatgtcgctaggtagcaaaatggaatataagacaggtgaaagcgctcccttagggggcgccctttcacgagaaacacctcgtattggcattgtcctgttagcagcaggtcagtctcgaagaatgggaacaaataagcaattacttccgtggcgcggaaagacgattcttgacgcggtatgtcatgcattacaaatttgctgggaacaaactaatccttcatggaatttaaaaacctatcccatggttgccgttacaggtggggaccatggtattgaccatattgctagtagttatagattttccattattcataacgaatgttctgatttaggtcaaggcacatccatcgcattaggcgtgaaatacttgatgaatgaatttggcacacgagctttagatggtatcatttgctctgtgtctgatcaaccgttactgaatccaatggttgttgaacaactcattactagctttcaacagcatagggatgaaacaaatagaacaatcgtagtacctaaatatggaacaactcaacaccctggcaatcccgttttgtttggtgcccattggtttgaggacttgcaacacatcgagggtgaccaaggtggacgaacaatcattcgtggtgtggggcataattttgtagaatatgtaagtattattcctgaatggggatttgatatagatacgccagaggattataacgatttgcaacatcgtgaaagtgagggtgtatgaagcctttaatacttgtgcgcggaggcggcgatatcgcttccggtgcaatttatagattgagacgtgcagggtaccctgtagtagttaatgaaattgctatacctactatgattcgcagagaggtgagttatggtaatgctgttcactgtggtgaaatgattcttgaacggttggttgcacgtcatgtgtgtatcggtgaaattcaggatacgttatcacaaggtgtgattcctgttgtaacatcgtcctatgaagagttattagatcaactgcatccggatgttgttgtagatgccattttggctaaaaagaatgtaggaactactagactcgatgcgccctttgttattggtgtaggtcctggatttagcgctggccgcgatgtgaatgtagtcatcgaaactatgcgtggccataatttaggacgctgcatttatgatggtgaagcggaaccgaatacggggattcctggcaatgtgggtggttatacccatgaacgggtgattcattcgccaaaggcaggggtatttacggctaaacgtcatattggtgacgaggtgcaagctaacgaagtgattggttatgtcgatgaagaaccggtgcgggctaagattaccggtacattacggggtgttttaaaaacgggacttatcgtatctgaccattttaaattggctgatgtggatgctcgttgtgaggaatcgcattgttatagtatttctgacaaatccctcgctgttggcggcggtgttttagaggccgttactgcatgggactatgaaaggaataaagatggaaagcatttatgatattatgaaagaccgattacaggtgacggagtcaacatttttggtgaccatcctatcggggcctcgccaaggggatagaactatctataatcaggatggggatatattatatggtgacgctatagaaggctttacactaaatagagtcaagccgaatgctttatgtgtatttggtagcactgaatgttttgttgaacctgttgaaaaggatccatctgtacttgtccttggggcaggccatgtaagccgtgccattacggatttattattatttatcggatgtcgtgctacggttgtcgatgatcgacctgaatatgtggtgcctgaattctttgatgagcgtgtaataagaaaatgtttgcctttggatgattttagagataagttacctcttgatgaatataatggatttattatcgttacgagagcccatgaattcgataacacatgccttgaacaattgagagatcaactgcctacttatatgggtgttatgggcagtcaacaacgcattcattatgcattagaaaatttgaaagccaaaggttggacgcaagaggaactcgatatgatctatgctcctattggtctagatttaggtgctcaaacaccagaggaaattgctttatctatcgtcagtgagtaccttgctgttgtacgaggtaaacaaggtcagtttttacgcagaaagagagttgtaagtcatgaatcgtgagtttgtagaatatttgagtcaacgcacagatgaaacactagcagtggcaacaattcttcatacggctggttctacgcctcgtaaagcaggtacctcgatggttgtattccctgatgggtctatttttggcactattggcggtggccgcgcagaaaatgaaatacgccttagtgctattgattccatgaagaaaaaggagcaacatcgacgtattgaagtaaaattaaatgatgatatagccgtaaaagaaggcatggtctgtggcggttgcatggatgtatggattaaaacgcagaatgtatgatttcgttttaaatttacagtgctcataaaatgcgataaaatataaggtacagctaatgtaatggctgtaccttattattttgtataaggagttgcacatatgcattttgaagctctcatacatacctttagaatccttgatctcatcgatatcttgacggttgctatcggtatttattatatgtataaactcttaaaggatacacgcgctgtagccttgctaaaagggttattatttttggctattttgaatgttttaagccatgtaatgaatctgtatgttattaactggattctccaacaagggatgaccgttatcctctttgcgttacctgtcgtgttccaaccggaattacgtcgtgccctagagcaacttgggcgtggccgtatttttagtaaagcacagaatgtaaacgaagaagaaatggacatggctatcaatgaagtgatggctgctgcacgcgttatgtctcgtgaacatacaggggccctcatcgtatttgaacgcgaggtaggcttaaacgactttattgatacaggcattatcgtagacgccgtactcagtcgggaattgattaaaaatattttcgttcctagtacacctcttcatgatggggctatgattatccgtaatggccgcattcaggctgcaggttgtctattgccgcttaccgaggaccgtacattgagtaccgaacttggtacacgtcatcgcgcggctatcggtctgtctgaacaaacagatgcagttgtcgttgttgtcagcgaagaaacgggtgtcatttcttatacctatggcggacatatttatcgtcacttaccagaagatcaaattaaagaggcccttcgtacatttatggaaagacctcgtcaaaatattacgagcatgtggaaatggggtggcaagaaatgatgattcatttgaaacgcaactggcctgcaaaaatactttcattattggcagccatcgtcatgtggttttttattatgcgcgaccaaaatcctgtgatggaggtttcctatacggtgcctgtacaggtgcaaaatttggcagctaattacatcatagaggatgcacctcaatatgtacgcgttacgcttagtgggcctcgcgatacgattattaacttaaagtctgataatcttaaggcctatatagatgcatcaggggtttcaacgggacaaaataatgtgactatccatttcaatccaccatcggggatgaacatagttgaaatcaaacctgatacggtaacgattaatgttgatgaatatgcatcaaagaaattacctgttgaaattgtgccaatcggacaaattccggataatgtggccatgaaatcggttactgtgattccgaaggaagtcactgtatccggtcgcaaacaacaagtaatggctgccacacgggttgtcatgaaggttaatgtggccggtcaaactaaaaactttagtgctgttgctgatttggaagcttgggataatgcgggtaatgtgctcgatgtaaatattagcccaacacaaggccaagcacagtatgaattaaatttacttagaaaagataaagccgtacctatttcggcaattaccgtaggtcaagtagcggatggttatgaagtcaaaggtattacgattaagcctgtacaagtaacaattacaggccgtgaagaaatggtggattctgtttcggatcttaagacggaatctattgatataagtaatgctacggcacctattgatggtacctataatatagtaattcctgatggccttactagtaagatgactacggttcatgtaacagtggatatacaaagaaaagcatagatatgataagaataataaatcttcgcgtagccgttaccgtaaaggctacgattgaggaaatagtagaaaataaataccctcaactaaagggatatatacagaaaattcatgtggtgagacgtgccgtagatgctcgtaagaaacccaatattgtatttgtgtatactctttttgtagaggctcaacatgaagaaaaaatcattaagaaactaggtaagcaaaaggatgttaccttatttacacctgaggatccagaaccgattgtaattggtgatagacctttagcacataggcctgttgtgatgggctttggtcccgcaggtatgatggcggccttttacttagcccgtgaaggctatcgccctatcgtgttagaacggggacaagatgtagatactcgtgcgaaggatgtagaaacattttggaaaacgggaacctttaaacctgaatcgaatgttcaattcggtgaaggtggggccggtacattttctgatggtaaattgactacgcgcgtcacacatccgcggttgcatgaaatttcaaaatactttgtagaattcggggcaccggaagaaatcctgtacaagcataaacctcatgtaggaacagataaattacgccatatggtaaaagccatgcgtgagcgcattattgaatggggcggcgaagtccgctttggtgctaaggtaaccgatgtattcgttgaccaggaccgtgtggtcggtatcgaggtgaatggtgcggaacgtattgatacgactttagttttatctggtgtaggtcatagtgcacgagatacgtatgaaatgttatttaaacgcggtatcgatatggtggctaaaccatttgctatcggtgttcgcattgaacatcctcaagatgtcatcgatcaatctcagtacggtttggatccaaggagtctaggtttaggtgctgctgagtattccttggtatatcatgataaagaatcggggcgtacggcctatagcttctgtatgtgtcctggtgggcaagtggtcgcatctgcatccgaaccgagcggtgttgtaaccaatggtatgagcttgtatgcccgtgacagtggcgttgcaaatagtgctatcgtcgtaaacgtaggccctgatgattttggtactcatcctctagatggcgtggcatttcaacgagaatgggaacgcaaggcttataaattgggtggttcaaactttaatgcaccggctcaaacggtaggttctttcttaggccaggctaatgcgccgtctgttgaaagcagtatacatagttatgaacctcatatcgtagattgcgatttgcaccagtgtttacctggttatgtatcatccgttttagaacgggccttaccgtattggggacgccgcatcaaaggctttgataaccctgaaatctgtatgaccggcgttgaaacgcgcacatcttctccacttcgtatgggtcgtgatgaaaatcgcgtatccactacagtcggtggcttttacccgatgggggaaggtgcaggctatgcgggtggcatcatgagtgccgccttggatggtgcagaaacggcgattgcgtgcatgagcgtgtatgcaaaacctaatgaatgatactttcacaaatagatttatacatttacgtgctatggtgaaagctcaacttggattttataaattgtacaaactcatgtgatataatacacacaacatagattgaaatacattcgtttgtagacggaggagaatatggctcgattatttggtactgatggtgtacgtggcgttgttaatgaatttttaacacctgaattggcataccatttggggcgtgcagcggcaacacattttggtaaagaaaaagaacatcctacatttttaattggtagagatacgcgtatctctggttccatgttggaatgcgcgttggcatctggcatctgttctgtaggcggcaatgtagttatggcgggagtcattcctacacctgctgtagcataccttgtaaagcaacaaggttttgatgcgggcgctgttatttctgcatctcataacccattcccagataatggtattaaattctttgatggtagtggttttaaattaccagatgaagtagaagatcaattagaagtatatgtacgtcaaagtgcagataacgaattacctcgtcctacaggtgctggcattggtcgtgtagagtataatgcaaatcttgcacatcactatgctcactttgttcgtcatacaatcgatacatcccttgaaggtttaacgattgtctatgatggcgcgaatggtgccgcttctagcgtaggtcctgaaattttgtctggtcttggtgcaaaggttatcaatatcaatgtcgatccagatggtttgaacatcaatcatcattgcggttctacccatatcgaaggcttgcaagtagctgttcaacaacaccatgctgatttaggtattgccaatgatggtgatgcagatcgttgcttgttagtagacgaaaaaggtcaagtcctcgatggcgaccaaatcatgctattatgcgctcttaaattgaaagaagaaggtaagctcaaaggcgataccgtagttggtaccgttatgagtaatattggcttccacaaagcagctgaagaacttggtatgaaaaccgtttctactgctgttggtgaccgctatgtattggaatatatgcgtgaacacgacctttccattggcggtgaacaatctggtcacgtcattttcctcgatcataacacaactggtgatggtatgttgactgctgttcaagtggcggctcttgtaaaagaaaaaggccaaccactttctgaattggctggcatcatgacaaaatacccacaagttcttataaacgtacgtgttgctacaaagactggttgggaagaaaacgatatcatcaaagctgctatcgtaacagctgaaggtgaacttggtgacgaaggtcgcgtactggtacgtgcatctggtacagaaccactcatccgcgtaatggctgaaggtccagaccaagaagcattacaatccttatgtcaagaaattgccgatattatcggtagagaacaagggttggctgaataactcttgatgagtagtttgacctattccgtttggttccattctacaacttttatattaacggtaaccctcctatatatgtccctttgctccgtcctacgtaaagtcgctgcaggaacatatataggagggtatttattttatatttatttaggatggttaccgaatggaaccgtcactattgcgcggtcatttctactcataagagttatttctggtatggagaggccgatagcagagatgatgtaattcatctcttagatagttaagagatgggatggtgtttttgcaaatacgtacatagggcatggtttatgttattatagctatatagtttaaatcgtattggtttaatagttaaggtgtagtatgaagaatataaatcaaggggaggctgaggttctccttaatgagtacccgaatagtgttgattctgtttgtgagcttgcaaatgctgagtcacaagcatggagagagaaaaattcacagcttatcttggagaggttcttagaaaaatatagcgatgaattgaatgatgttgaaaaagctaaagtttatactaatttggctttttattataatgatgagggcaatataaaagaatatgagtatctatctgcagctgtaaaattaaagtctccatatatagagacctaccgagggttggctttatatcattttacagcttatagagagaagggatctgtagaggagttaaagaaaagtttacgcgcctttgaaaagggaataacagtatctgatgattatgaaatgaactttggctatgcggtatgtttatttgaactcaaagaatatgaaaaagcaaagatcatatttttacagttacttgaaaactatccaaatagaatgcgattattgctttgtatagcttattgtgatgtgtatttaggaaataaaatccaatctcttgattatttgaagaaaattaagattggtggagaccctgaatatcagcgagatgatgaaatttgggagtttgatatctttaatgcctattatgtattagatgagtacaagttattcttagaagaatgtgaaaaggctaaaagctcttgtgacttaaattacggaccttattattttggcctttggactatgaacctacatgaccaattctatctagaagtggtcaaacaacgagcagaaatactagcatgtattgaagatgtaaaaatagatgatgcctttgtgagtgaagaagagcggcaagagcatctccaatgttggaaagatgatttagaaagcctaaatatattagagcataagattaaatatgaaaactacaagcctgtagttgaactaaaactatggcccatatatgactgctatttgatagattatttaacgcataaactctcagaataaattttgatataaccttatgcagctttgtatggttctaaatcggcatagaaataaaagaggcaacgtcgtcgacgttgccccttttatttcttgattttatttatcagcaacaacgagtttatatccattcaagtgaatattatctcctgtagtatcttcgttcgttaaggattttacatagctatcgcctgtaagtgtccaagtggaatctttgctgagttttagtgcaatttcttttgctgtattgtcagtgttgatagcgccaactaaactagatccatttgtcatgtctagcgcaatggtgctaattgcatcggctacaatattgccgtttaaggcttggttggaggcgcgaagtgtaaggtgaccgccattttcaccggttttgccccaacgggagtcggccgctgctttcactagtgttgtagtattgggagtagagatagcattgccagtaaggtctacctctgcagtggtgttgttcacatagatgaaagcgcctgtagcatgggtggtgagtgagttgttttctgctttgaaacgggcaataccactttcagcatcaccagaaaagctttggtatagcataaaaccattgtctttgtagcctgttacattagagttggtaagtgtgatggaatttttgccttctacaacaccaatttcactgtttttagcttcgcccgtaatatagtcagctgtgatattaccagtagagtagataataggactaccttcaccagatgttgttaatttggcagcctctgctgtaatggtaccttcgccacggtctgtagctaatgtagcagagtgagcaccttcggttgtaatagtaagatttttgccgtttacagtgcctttataagtggcatctaaaccgcgggaggaatcgctctttgtgtgaatgttagaattctctacattgatgacagaaccttcaccagtggcaaatactgcattcgagccattggaattggatgtaatattgctgcctttaatgttgatttgactaccgtcggtaccgagtattactgcattttgaccacggaaattactattgtcatcgcttgtcgtattgcctgttttatcgaatacgctgttttcgatggttacgactgctttatctttgccgatgaacgcattttgatctgatgttgtattagatatcaattcatgcacaatggctttattttcggttactaccgtagtacctgtgaaagtattaggattagcttcagcttttggaactggcccattaggtgcactcataggtggatttccagctggtggtgcacttggtatgtcttccgcaaaggttggaaggaatgccaatgtagaaagggcggcacctaatacggcaggaaggacccaacggcgtaattttctatatgagtgtttatggtttagagatgttgtctttttatgtgttttattattttgtgtattcattgtaatctctcctgttagacaataaatatgtatcatataaattttgataaatatgattgtataaaatttttataataagtagtataatgatagtgtatgagtgatttatgaaatcgtttggctttatgtacccctatgaaaataagcgttatatctcgtgtttaatgctttcataaggcctagattctttacattcattacatcgatttagtataatatagtttagtatgattacaattgtactagttctgccacatatgagtgaaaggagtcccaaattcgtaaaggcgaatagcgcaagtacccgcgaaggcagtcgttagggtagacgaggggaagggttatcgaaccatcagcggatgctcttccggcacgttcatgtcgtaacaagtactaaaaatcccatcggtaacgatggggacaaagggtatttgattgaacaaatttagaacagtaattaacatattacatagaacattaattagttagccttagttgttggctggggctagaaatacccccagttataggaggatatacttatgtgcggtatcgtaggatacattggctttaatcaagcatctgatttcttattggacggtatggcgaaattagaataccgtggttatgactctgcaggtattgctgttatcggccctgaaaatgtaattaaaattcaaaaaaaggttggccgtctagctaatcttgaggcgattgtaaaagcagatcctaatgaagggactgtaggtattggtcatactcgttgggctactcatggtcgtccatccgatatgaattcccaccctcatgcatctgaagatggtaaattcgcggttgttcacaatggcatcattgaaaattacatgccgttgaaagaagagcttatcgcaaaaggataccatttcaaatctgaaactgatacagaagtagtagctcatctattagaagatatgtacgatggtgattttgtaggcactgtgcgtcgcatgcttgatcgtgttgatggtgcgtatgctcttgaaattatctgtgctgatgagccagacaaaatcatttgtactaaaaaagaaaacccattggttatcggccttggcaaaggggaaaacttcgttgcttccgatattccagcaatcattaactatacacgtgatacatacatcttaaacgatggtgaattagctatcgtaacacgcgataatgtatctgtatttgaccgtaaaggcaatactattgataaagaagtgttccatgttaattggaatgcagaggctgcagaaaagggcggttatgaacatttcatgttgaaagaaattcatgaccaaccaaaagctgtgcgcgatacattcggcacacacatttctgaagacggcaaagcagctatttttgatgagttaaattggactgctgatgatgtagcagctttcaataaaatccttatcgttgcttgtggtacagcataccatgcaggtcttgtaacaaaacaatatattgaaaatttggcgcgcattccagtaagtgtggaaattgcatctgagtatcgttacagcaatccgttgactgatgaaaaaacattatgtatcgttattagccaatctggtgaaacatctgatacattggcagcgttgaaagaggctaaacgccttggcgctaaatcgttagcgattacaaacgtagtaggttccagtatttcccgtgaagcagataacactgtgtatacatgggcaggtcctgaaatctctgtggcgtctacaaaagcgtatactactcaattagtagcaggcttgttgttcgctgtataccttggccaattaaatggtaaaatggatccggctttaggcgaagaaatcctttgcggtgttaaaaacttgcctacattgattcatgaaatctttgaagtagacgaagatatgaaagcctttgcaaaacattatggcttcaaatctgatgcgttcttcttgggtcgtgctatcgactacgcagtagcgatggaaggtgctttgaaattgaaagaaatttcttacatccatgctgaagcatatgctggtggcgagttgaaacatggtacattggctcttatcgaagaaggcatacctgttatcgcattggctacacaagaggatgtatacgataagatgatcagcaacatccgtgaagtaaaagcgcgtgaagctgttgtaatcggtatcggcatgaaaggtgacgacgaattatctaaacacgttgaccatacaatctatgtacctcgtgcgaataaattcatcgctccaatcctcgctgttgtaccattgcaattattggcgtactacgcagcgattacacgcggcgcagatgtagataaaccacgtaacttagctaaatctgtaaccgtagaataatatatataaccaacagtgccttggcactgttggtttatttcaatatagggagactattatggcagttatattttccggcatccaaccaagtggtgaattgacacttggtaactatttgggagctttacgtaattttttagactatcaagatactgatgaatgttactattgtatcgttaatcaacatgcgattacagtaccacaagatccaaaagaattatttcaaaatactcgtaatttggcagccttgtatcttgctgttggcctagatcctaaaaaggtaactttatttgttcaatccgaagtacctgaacatgtaaaacttggttgggttatgcaatctatcagctatgtaggcgaattagaacgtatgacacaatataaggataaatctcaaaagcaaggtgactctattcctacagcgttgcttacgtatccaccattaatggcggcagatattttgttatatggtactaactatgttccagtaggtgaggaccaaaaacaacatcttgagttgactcgtaatttggcagagcgttttaaccgtagatttggcgaaactttcgtagtacctgatatcaaggtaggcgaaggtggtgctcgcgttatgagcttacaagagccaactaagaaaatgagtaaatctgatgataaccaaaatgctacaatccgtcttttggatgcaccagacttgatcgtgaaaaaattgaaacgcgctcaaactgactctgacaacgcggtgcgttacgataaagaaaacaaacctggcatttctaacttgatgggcatttaccgtgctatcacaaaagacagctatgaagctatcgaagaaatgtatgctggtaaaggatatggcgcatttaaatcggatattgctgatttgcttgtagcaacacttgaaccaattcaacaacgatacaatgaactcataacaagccctgaactagatgtcattttagatgaaggtgctgcaaaagcacatgcaaaagcatctatgatgtatcgcaaggttgaacaagcgatggggctttgccgtaaataagtatttacatacacttttgaggtcaattatgacaaaacaagaggtaagcgaacgattttcgggtggccatgtaaagcatatggtcaccacacataaggccgtacagtggctaggacggattctaggcattgtaatttgtgttgccctcattaaatgggccccacatgatataggtaatcgcatgctttgttatgcattggtcgtttgcttgttatggtgggtacacgggctcgatgtagtgctcgtatatatttgtgaaaaaggctttgtcatcaaacagagaccgacaaatttacgtgactatttccgtagtgccattaatttggatgattactatgtgtatgttccttttgaaagcgtagttgggtttacgcctgattggaaagaactacaagccgttaatactcatggtggcatttatgtagtacctttagatctgcaacttgcaccgtataaggataaaatgcgccttcaagccgccataaaacattatagagatacacatgatgtataattttgtaaatttattgatttaactatttacaactttaatacgctaaagtataataggttcataagttaaaacatgacctataacatattgtgtggaggatattatgaactggaaaaagattatggctgtaggtttggctgcagtttctatgatggcttttgtaagcggttgtggtagtgacacaaagaaggctgatactcaattacctaagaaaattgttattggcctagatgatagcttcccaccaatgggctttaaagatgataaaggtgaaatcgtagggttagatatcgacttggctaaagaggctgctaagcgcgctggtatggacgttgagttcaaagcgattgactggtccagcaaagaagcagagttaaaatctaagaaaatcgacgtattgtggaatggtttaactgtttctcctgaacgtgagaaaaatatcttgttttccgatacatatatgaaagataaacaatacatcgttgttcgtaacgatgataatgctatcaagggcaaatctgatcttgctggcaaggttgtaggtgtgcaacaagctagtactggtgaatctgcattacaaaacgatcctagtggcaaaaccgttaaagaaattaaatcctatgctgatttcgtaagtgcatttatggatcttggcattggtcgtgtcgatgcagttatcgctgatggtgttattgctcgttacctcatgacaaaagaacctggcaaatacaaaattgtagaaggcactgattacggcgtagataactttgctgtagggttccgcaaagatgataccgcattacgcgataaaatcaatggtatcttagccgaaatgaaaaaagatggtactgctgataaaatcgttgaaaaatggttgggctctagcgcagatctagataagagcgatgctaaatagtacgattcgtgatatactaatagtactgtggtcagtatgtacaactgataattaaagaacgaaatgtacactagagaagaggccatgtgcctcttctctattcgtgttttgaaggagtatttcatgttagattatttattgcagattatcccgaccattgcggatgggcttaaggtcaccattgcactgttctgtgttgtatgggtactatctatacctggtggtatcatattagctttactgcgactatctaagcttcctgtagtcgataaaattgttgaagcctttgtatatctaatgcgtggtacgccgttgatgttacaaattttattcatgtactttgcattgccaatcatgacggatggggctatccaaatggatgatgcaacggctgctgtggttacatttgtactcaactatgcagcgtacctttgtgaaatcttccgcggcggtatccaatcgattccacgtggtcaatatgaaggggcaaaggttcttggttttacctatggtcaaacgatgcgtaccataattttgccacaaatgtttaaacgcgtgttgccaccacttgccaacgaaacgattaacttattaaaagatacatccctcgtatacgtattagctatgaatgatattttgcgtattacaaaatctattgtacaacgtgattttgatatttctgcgttccttgtggccgctatattctatctaatctttacatttattttgacaaatatctttaattatttagaaaaacgtttctctgtatatgatgagtaagaggtaattatgacttttgtaaatatggaacgcatagagaaacactttaataataatgtggtattgaaagatgtttccttgcaaatgaataagggcgaaattgtatctattatcggcccatctggctccggtaagtctacatttttgcgctgcttaggtcagttggaaacgattgacggtggtactattaccgttgatggtgtaacgttggcatctacagatgctagcggtgtcgttacctatgctgataaacataccatgcatgatttattacttcgcatgggtatggtattccaatccttcaatttgttcccccatatgactgttcttgaaaatattatggtggcaccgcgtatggtaaaaggtatgaaagataccgatattatgccaatcgcagaacgcttacttaataaagtaggtctttgggataaacgagatatgtatccctctagattgtctggcggtcaacaacagcgtgtggcaattgctcgtgcattagccatgaacccagaaattatgctctttgatgaaccaacgtctgcccttgatccagaattgactggagaagtattaaaaacgattaaacaactagccgatgatcggatgactatgattattgttacccatgaaatgaactttgctcgagaagtttcagatcgtatcatctttatggcagatggtatcattcaagaagaaggggaaccggaacaattgtttaccaatccgcaatctcctagaactaaagcttttttagaaaatatgttataatccttaccacctatgtaatcataggtggtaccttcacatatatgaaaggaactttatgaaattacctatcgcattagtattagctggattgtccatcgtatctagcgttgcttacggagcctctcctgaacatgctacgccaaagtctatcgtagcctcgcaagcagatgctctttccgtattgccagagcaatataaatcgtatgctactaagatgaatacggttgtaaaggatacgaaacacggttatactttcaccattccttggcgtgtaaatgatggtgttatgattgatatggatgtacggagtgaaagtgaacatatacaggggtattcctttaatttgtctggaccaaatcaagacgacgcctataccgtgtcttttacaaagagaaataatacaccgcaaggcaatgtgtcacaaaaggtgtggaatacaacatggtatgatgttccaattaagggtatgacggatgaagaataccttcgtatttggcgtcaacatagtaatgtatttgatgctaacgatatagtgggcggattcttccctaaaaagggtgcacaagcagcacgctggagccgcacgacaccgaagtcctatgcagagatgacatctacggaaaaggttcattctatttttgaagctgaatttattatggaaaaagatccaacgcatcgctataatcttgtaagtacgtatccacctattcaggctaaatttatggaacaaggtcttatggaaacgacagttccttcattttctttgttagatactaagaagactggctctacattaaataatgttaagaaactattgactggatctagtgatatcaacgtagcagaaggcttgaaattcattagccctaaaggattcacacgcattaatgatcctaaaaagattactttcacaaaggataagattcgtctcgacatagaaagtttttctgttcctgtacaagcggtgagcagtgctatgcctacgatgatgggcaagcagatgctaggtgaccaatatgtaaaatctttggtggatgtaaataaggccaccattgaacgatatgaaacacatattattgatggttccgttatgttttatgtagcagggacaatgaagaatcctgaagtcgcagatacgaatacggcggaaactgttacattcggagctacgattattcttggaaataatggcaatgtcggtgtagctcgcatgatagcaccaattagtactgtattgactacacctgaactaatcgatattttagatggatttaagttaacgaattctttaaatatcaataattcgtctcaagttctttaatctgcaaaaaaatgtgctataatgtatataaatcctaattgaaaaaagaggatttttcctaattcgtctagaatattataaatagactaaacgatttttaatcatatcccttcatggggattagaaataggaggggttaatatggttacctacaaaactattgtcgtacctactgatggttctgaaaatgctaaacgtgcactagaacatgcacttgcagtagcagatcgtaacaaagcagaattgattgttgttcatgtagcaaatattgtatctgctatttccaactttgatcaaacaccaatttctggtggctatgtgtctgaacaaattgcagaagacatggaagaaacaggtaaagaaattttgaacgatgtagtgaaagaaattcctacaggtgttaaagttaaatctgtatttgaagttggttccccaggcccagcattgttagctgttgctaaaaaatacaatgctgatcttatcgtaatgggtagccgtggtcttggacccttgaaaggtttattcatgggtagtgtaagtagctatgtaactagtcattcctcttgcccagtattggtcgttaaataatatcatacaatttaaaggctttgtcattgtgtacaaagcctttttttgtatataatagatagcatagagatagtatttaaatttagatagattattagtgttagtttaaaagaaaggatccctatgatcgacgggaacgaatcattgttaaagttagcagaattgtttaagattcttggtgatccaacgcgcctaaagattgttgagatactgctagaaaatgagatgtgtgttaatcatattgcagagacaatgggcatgggacaatctgctatttcacatcagttgcgagtattgcgacaagctcgtcttgtaacatatcgcaaggaagggaaaactgcatattattctttaaatgatgatcatgtagaaggccttgtgcgaatgggtatggatcacgtatcacatcaataataagttttattataatgaacacctttcaccatattatgaatgaaaggtgtttttagttatgttagatatgagagtggagatgtatatatagtgaacctgttgatgaaaaatataggtatatttgtggtatttattgccacggtatttttatcaactaaatcaatttgggcaaagttaatttatctagattcattaagtcctttgagtgttctggcatatagagcgcttttatcattacctttttttatcctaccaatgattcattttaattggcagagtgtgaataaaaaacaagttttttattattcttttgttggagcagttctttatttaatttcgtctatggcagactttataggtttattatatatttctgcttctttagaacgtgccgttttatttacatttcctatctatgtatttttactatcatcagatttatccagaattacgatttcaaagattgtgttaattattcttactgttttaggattagggattatgtttaatcccactgttgacagtcattttactaatactttaataggcgtgttattagttttagtttctgctatattttgggctttattcatgatttatagtaagcgggtcgttttaagtattagtcctactatatttactagtacatatatgtgtataactacagtgtttttactttttggctttatactaaatagtggtggcttttcggagattctagcactccaacctcatactataatttatttaattttcttggctattttctgctctatagttccatcatacttaatgtcctttgggctaaagaaaattagtgcatctcttacagcagttattagtgcaatgggcccaatagttactttgggtttagatgtagttattcttaatcatcacttaggcttaaatgaaattataggtgctataatagttacactttgtgtgacttgtttgacgagactaaatgctaaggcgtaaaaaggggctgtaacagaatgcggttttaccgcattctagttgcagtccctttaaaatataagaaataccaagaaaattagatttgtaaaatcctatgttttcttggtattttttgtttttaggcgcacctaaatagacctttaggcctatttaaaaatttcttagtttaagcagtttcttttgcagtaaataatgttgtgttaacgcgtcctgcttgtattctgttatgtaatttttcaatattgaatcccatagccagtagatataacatcttatgcacttttccactgccacgatgtaaaaatcgtctaaacccaagatcttgttttaacacaccaaatgcgccttcaacttgaatggaacggttaattcgtaattgaatgcctgtattactaagcagtctgtcttggttttctgccaatacagcatcatatgcaggtgtaatttcaattcgttttactggatttactgttgttggtttcatataccgttggcattccttcttgtatccacagcggttacaagattcgcagacatatacctttcgctcagatataaatccggttttgtttttagcattacgagtcaaagcatattttaatttacggccttttgcacatataaatgcatcttcttctggtatatattccatattacgagctttactaatatctttagtccaagctctagtttttgccttttcataatattgtggttttatacaagataggtactggttgttttttaaccaagttaagttctcatggctatcataaccagcatcagctaccacatatgtgaatcggcgactatggatttgttctaattgctgtacaaatggaattaacgtattcgtatcgttgggcttagggaatacaccaactcccataatatattcagaatgaacagctaattgtacattgtaggcaggtttaagctgtccattacgcatatggtcttccttcatacgcataaaggtagcatcatgatctgttttagaataactattgcgttcacccataatatacaactgctgttcgtattctttgcgtttctcatatagaacttcagctcgctcatacaaccgttgcaatggtgttttatgcttgccttttccttgtacgagttccatattttgtacttcaatttctttggctaagaaagtatatatacattcatcattcatacaatgggtatctagccctaattcattccagatgtcttgctttaatatagctaatttagagggtaatgtatctagtcttttttgtactgcttttcgccagacaaaggtatacttgttggcattagcctctagtttagttccatcaataaagacttcattaaatgttaaggtatcacgtctgttaatagcttccatcatctgtgaaaacagattcattaagatatctagtgtacaacgtgcaaaaaatcgttgaaaagtcatatggcttggggctgaatagccttgaagaagccacatataattaatattttcttcgcattgttgttgtatcatacgtgtagaatacacgccattagacatagcatagacaaaaattttgaacagaatatgcggtggaactttagattttctccctttagaagaatacaaatgctgtaactctttatagtctaattcctccaatacagcatcgagtaaccgcacaggcgctgtttcttttatcaaaatgccataatccaatggtaaaactagttggcgaggcattactagtttggtataattagattcattggtatggtttttgttcataatttaattataccaacgaaaagggtccctcgggaccctttttgcttggaaatacaaaaaagttattagttgatttcatataatcaactaataactttttagatttaaggggctgttttgttacagcccctttttataatttttatatttttaatataatgggaaaaggtaataggcgattgtaataaatagcggcatagttactgccgatagaattgtggtgcccataacgatttgcgtagcatattcaggattattcttcatttcaatagcaatgagtgccatattaatagctgttgggacactgtaggtaatgactatagtctgtgctgctattggatgcattgggccgtagaacataataaatagtatagtaataactgctgcgataagagggcttacgatgagtcgtaaggaggtagcgagcataacatcggccttaaagaagtttaatggagttctattaatttgtacccctaaggcaatcatcgcaacaccaacaaaggcattagcaaaaatcttaagaggtgcaaagaagaagaggccatgtaaatcaaatggtaagagctgacatatcagagcaagagggatagcgtataccattggcatatggaatactacgtttaaggcatcttttgtgctcaatcggccagcaccagcttggtagaaaccataggtattactcgtaatggtttgtataatcatgatagatacaacgctaacgaggcctaggtcagcatagggggttgctccatcaatgatataaggcacattcgtaaatacgaagatggcaagagcaatacccatatttccaacgttattaaacatgacgcagttttttaatgttgcaattttggccacatcatagccttggattttaccgactataccagaaagtatagagtttaggatgagtacaactagtgcacaaaatacaatttctagtgtgccagatgtaaattttgcttcatacatggctctgaatacaaaggttggtagtagtatatagaaattcaatttactcaatgtatagaggtcaagtttgaattttctatctagtataaatcctacgccgatgagtatgaagattgggatcatagaattcataaatatatgaccaattaattcaaatatattcattgtctcacctggagtttctcattaattattagagtatcattatatagtatatatagtattatcatatcataggatgtattgttttggggcttaaaagttgattcattatgattacttatcatattcatcagaaatatacataaaaaatgtgagtttttacatataatttaattgttagaactatagtataatgtgaatatattgtatatttgctttgttatttaagggtgtgtctctgagatatattactgatagcttttacaggatggattccacgaggagacacaggaggagaaatcatgaaacgaattctattagtattaatgagcgtttttatgcttgcttttctagtaggctgtggtaatgatgcaagtaaaactacggatagcgcaaagccaagtacgtctgaaaagattacaattcaagcggctgctagccttaagggggctcttactgaattagcagatgcgtataagaaagagcataacttagcagatgatcaaatcacaattaactttgctggctctggcacattgcgtcaacagattgaacaaggtgcacctgcaagcttattcatttctgcagacgaaaaaaatatgaagatgttacaagataaagatttagtaacagatgtaaaaccatttgtaacaaatgaactcgttcttgtagttcctaaaggacaacctaaaattgagttacatcaaatcgcatctgtaaaacgtattgttttaggtaatccagataccgtacccgctggtaactatggtaagcaagtactaacaaaattaggtgtatgggaccaagtagaacctaatgtggtatatgctaaagacgttaaagctgtaacggcttctattagccaagcggctggtgatgcgggctttatctataagacggatgctattgcagccggtgatgcagttgaaattgctgcagtaacacctgcagattctcatgatcctgttatataccctatcggtattattaagaaatatgataatgctttggctcaagatttctatacatacgtaatgagcccagagggccaaaaagtattggaaaaatatgggttctctacgtctaaataagaatttaacgctagcttttagggctagcgttttcttatgatacaatagagttataatttattatccggcagagattcggcaaagaaaggaggcccgatatgagtccattttggttgtcattgtgggtggcgagtttagctctagttattgttatattgactggcttagctgcttgttactggatgaatcgatgtaagtggagtggtatcgctattctagatgccctaataacattgccgctcgtgttgcctccagtagtagttggctttgctttgcttatggtatttacaccgggctatgcattcggcgcttggttagaatcacatggtttaggcgtcgtatttactgcagcaggtgccgttgtggcctcttctgttattgcctttcctttgttttatcaaacggtacggtccgcattgcagtctgtagaccataatatggaggacgtagcacgtacattaggcgcttcagagctgcgcatattttttacaatctctgtaccattggcatggaaggggattttaacgggcagcatattggcattttgtcgtgctatgggtgagttcggtgctaccatattaatcgcaggtaatattcctaaaattacgcgtaccatgccacttgctatctattcctatgtagaggcaggacagtacatggatgcctttgaactcgttatttacatttgtgtgcttacattagcgctattgagcggtattcacatccttacaaaaggatccttgttccgtaatttagggcgtaattaggagggactatgattacattttcttttaccatagcaagaccttctatgattgtgaaagccgatggtactttagcttcaggaattacggtgttaaccggttcatctggaagtggtaaaagtacgtttattaaatgtattgcagggttagtgaaacctacaactggtatcattcgatgcgatgaacgaacatgggttgaccgagatcaaaatatatgggtgccagctcaagagcgacaggtaggatatatgccgcaaggcaatatcgtatttcctcatttatccgtggaacacaatattacatatagtaaacgaggcacacctgatatgtgtgattctctattaaaacgtttaggattagaaaaataccataacactaaggcggggcgcttatctggtggtgaacaacaacgtgtggctttaggtcgtgcactctattcaaaaccaactatattgcttcttgatgaacctttatctgcattagattggaaccttcggaaacaagtgcgtgtggatcttgtttccatcattcgtgaatgggacgtgccatgtgtatgggtgacccatgatgaaagcgaagctgatgcagttggtgatagacactggaactgtgaagacggacaaattattatacctgaatagtaaaacaccttcataagcatgattgcttacgaaggtgtttttattttagtgttgttttatttcgatagatgaggtttctgtatgacttatgaagccaacgatagctgtaacgacaaatgctattgtaaaggccggtaatgtagcacctattgtactttcactatgtaacatatagtggtataaaccaacggatacggcccaaataagacctcgtacgagataagcggataatgtttgtacttgctgacgattgataaagtagtccgccaaaagaatagcaatcatcggcgcaaatacagagccgatgaggtatagaaagtctgtaatatcgtccatcggatataggatggcagcgattgtaccaacgatagtaactacaacggctatgactttactagaagcactcttgtagatagttgtgctagaaacgcctgcagagtaagcgtccataaaggttgtagttacagtagagaagatgataacgatgagccctgcaaggccaagaccggcgttcatcatgatggtaatgatagaatcgccaccgccaaagatagctgcactgaggcctaaggtatacataacgatacttgttactgtgtagacagtagcacttgtaagtgatgcggtgaaaggttttttgctttcacgggtataatcactgatgagaggtagccaagatagtggcatggcaatagataattcaagagcagcgatgaaactcatgtttccgctagttagaatgataccttcactaggccactgcgatatcatgtgagcgcccatgtaaagggtgagacctagcaatagaactgatacgatggcttgaatatagcccgtattgtggaggccgatgaaaagccacaagatgacaagcgcgccaatagctatcgtccaaattataggagatagaggtgctagttcttgtaaggctagcatagcatcgtagatcatgatgctagtccagccgataagttgaagcatatttaaaaaggcaaagcctttagcccctagtgggccaaagctgaaggcggtagtattcatactgccttgccgcaaacgtccaccgatgaggccagccccaaagagcagtatgccgccgatgatatgtcctaagatgatggcatatagaccttgggtgagtcctaagggggccagataggttcctgtcataatttccgctatagatagagcggcaccaaaccatatcatggcgaactgtggttgtgtaatgtgtgtgtctttcatacgtcctccttgccaaggagtcatagaaaaagccgagttcataggaactcggctattaatcctctatgttccctacgttggcattatccaaatcaggttatgggttaaagcgttagcttactctcagcccacttgtgtgagcaccccgttatggctttcattatacgaggtgtgtagggaatcgtcaaatattctgttgcatagattgtataatgatgttataactagagtataaaaatatattgccactaggggtgcttttgctgagattgaccattcaaaaccctagacctgatccagataatactggcgtagggaagtggagtgcaacataatactaaactattacgagaccattccattgggagtggtctcgtttttatatgtttggaggtattatgaaattacatactgcattaacaattgctggtactgatcctagcggtggtgctggtattatggctgatttaaaatctttccaaagccgtaacgtatacggcatggccgtggttacgtccgtggtagctcaaaatacaacgggtgttcaccacgtagaacatctatccttagagagtatagaaaaacagttacacgatgtgtactcagatattatgccacaagccgttaagactggtatgattgccttaccggaaatgatggatctcatttatccttatatgagtaaaccaattccttatgtaatggatcccgttatgattgccactagcggtgatcgactcgtatcagatgaggcggtacatttcttaaaatctaaactgattcctaccgcaacggttatcacacctaatcgcagtgaggctgaggtcttagcggacatgtctattaattgtgaaagcgatatcacaactgcggctaatcgaattttacatgacttagggccgcaagtggtcatcattaaaggtggccatattggcgaagatgcaatagattatgctttcacaagagatggtcacgttcgtacgtggacgagtcctaaatacgatacggtgcatactcatggtacgggctgtaccttctcagcggttattacagcggagcttgctaaagggcgtgatgtaatggatgccatcggtattgccaaggactatattgctcttgctatcaagcacaatccagcgttaggcaatggctgtggcccagttaaccacatggcctatggtttattggcgaatggaactgaaacgatggatgagctcttgcaaaaagatgagaggagatgatgctatgaacccatatatgtataatcaaattaggcctaaattcaatatgttatacacattgcggaagaaaaaccctcttgtgatttgtattaccaatgatgtggtacgaacctttacagctaatggactactagctattggagcatcgcccatcatgagcgaatgtagtgaagatttaaaggatcttattgtgtatgcatcagcactgctcatcaatattgggacacttacacctgagaaggttggttactataaagaggctattaaactagcgaaggaatatgatgtgccaattattcttgatcctgtgggctgtcatgcaggagcttaccgattgtcggtggtcttagatttgattaagactggttctatttcgttattacgaggcaatcaaagcgaagttaaggctgtttatgatgcactgagttctgataataaggatgaaaactctccgttaggtaagggtgttgatggggcgcaggtagcggatagtgccattatcgcatatcgtttagcgcgtcttattaactgtcctgtagtagcaacgggcaaagaggattatgtatctgatggaactcgagtctttgcagtgcctcatggtcattcgattatgactgctgtaacgggaacaggctgtctcttgggggccgtattagcagccttttttggaatttatgattcctttaaggatagcctgtctacaggtgaatttcttgcctatgcattggcgtattatggtttagctggtgaaagtgctgttaaggtaagtggaataaaaccaggtagctttagcgtagcttttatagatgctttgtatacgctagatgatgaagtgcttgtatctgaaaatcgtgtgcagtccgtagttgtaccagatcaattacaagtgtatttcgtgtgtggtacacaagatacagagcttaataaaaaacggttgctcgaaatcgtagaagatgcttgtcgtggtggtataacctgttttcagtttagagaaaaaggcgatggtacattagaaggtcaacagaagttagaactagcacaacagttacaacatatctgtgccaagtatcatgtgctctatattatcaatgatgatgtagagctagcggtcgctgttaatgcggatggtgttcacgtagggcaagacgatatgtgcttagaagatgtgcgtaatatcgtaggtcataaggtagtggggatatccatccattccatagaggaactccataagacagatgtactgtatgctgattgtgtaggagtaggtcctatgtatacaactagtagcaagcctgatgcacaagaaccatgtggcccggaacgtacagctgaactacaggcagaaggattaaccttaccatgcgttggaattggtggtattactttagataatgcaatggcagtactccatgctggagcttgtggtgtagccgttatatctgctattgcccatgcagaaaagccttatgaagcggctcgacgatttaaagaattagcatctagcctttaatagtaaatagtatgacttacgactcttaatacatatataactaatagaacacaaaaaagacgatgaccgaagtcatcgtcttttatattgaggttgtctgtacatacagttaggaagaactgcacttgcagtatcaaatatctgtatttaaaatattattttatctaaacttatagattagatggattcaacgtggcgttggaagaaagcttgtgggtgagcacatactgggcaaactttaggagcttcttcaccaacgtgaatgtaaccgcagttagcgcaaatccatgcaactggttgatcgttgtggaacactttgttgccagaaacacgagctgctaatgcaaggtaacgagcttcatggcgagcttcgattttaccaacttcgcgcattttgaaagcgatagcagtgaagccttctttttctgcttcatcagcgaaatctttgtacattgtagtgtgttcatagttttcaccagctgctgcatcgcgaaggttagcttcgatatcagcggagatgtcgccaccatgaagagctttgaaccaaactttagcatgtgcagattcgttgtgagctgtttcttcgaaataatcagcgatttcgttcatgccagctttacgagctgctgctgcataatatgtatatttttggaatgcttgggattcaccagcaaatgctgtttgaagatttttttcagtgttagaaccttttaattctgccattttaatactcctttgtacttacatcaaatttcaaaatttttaccttagttatatattcataaccacttggttgtgaatgcaatggtgggtaactcacttgagtttaagttaaataaaaacttatttatatactgattagatagacacttgtctatatttgaaaaaagcacttgcttatcttttaaatgagtacttacctatagttgtaaagaggcacttgcctataatttacaccacaatgtttttgattcgtatacttaacgaataatcattgttgactatattgtaacatactaaatgagaaatgcaagtgtttttgtaaaaatttatttcgaaaattttctaaatgataaatgttatcaatgtagtaaataagcggtttttgaaagcctgttaagtaatggatttattaaaaatagaattactgataatgagaatgagagttatatggaaaatcattattgtttgtagaaatgtttgtttttggtaacaattctgattaaaccgatagatcttattagtcaaagtgtacttttacctatattggagaacatattttaagtataataagatatatataatagaaatagtataaggaggcgctatggcgtttattagatattatgtgggcgatatagtacaaatgaaaaaatcgcatccctgtggcagtgatgagtgggaggtcaagcgcataggtacagattttcttatcgtttgtaaaggttgtggtcatcagttgttgatgcctcgccctaaatttgaaaaggcagcgaagaaaatagtatcgcgcttgcctgaaaatgaatgaggtaggactatggtacgactcactgattatgttacgagtggaggctgtgcgtgtaagattggtcctcatatattagaacgtgttttaaaggccgttacacctgttataaatgaacatgttctagctgatatgactggtgctgatgatgcaggggtatatcaaatttctgatcaacttgcccttgtacaaacattggattttttcacgcctgttgtcaatgaccctacgttattcggtaaaattgcagcggctaatgcattgagcgatgtatatgcgatgggggggatacccctaacggcgatgaacatcgttggatttcctgttcccttagtagaacaaggcgtattgacggatgtactcaatggggctgcgtccattgtttctgaatctggtgcagccattgtaggtggtcacagcatcgaaaataaggaacctatttttggcatgtcgatcacaggtcaagttaatcctaatgagatttggaagaataaaggcgctcgagtaggggatgtattggtgttaacaaaacgcatcggcacaggtattatgaataatgcgttgaaagctgatttatttcctactggtacggcgcaggcggttgctagcatgagtacgttgaatcgcgtggctgctgaggtggctcataattttacaattcatgcgtgtactgatgtgacgggctttagccttatgggtcattctgtagaaatggcgagtgcctctaatgtgacgattcatatcaagatttatgatattccgctctttgatgacgtcattgacgcggctcgaatgggccttgtaccagcggcgtcctatggcaatcgtaaggctattacagatgtacaagtagataaaatattagattctgtgtggacggatattttatttgatccacaaacatcaggcggtcttttattctctgtgcctgctacagaaggatcggattttgtgaaagctttacatgatgtgggcgttgaaggtgccactatagttggtgctgttgaaagctttagtggcttagcggtacgcgtcactaaataagatatattacaattttgattttaatagtatatagagtagttgtgcgttgatgctttcacaaaatatataataatattgaggtaaataatgagtaatacaaatgaattaactgtagatgtgcgtggcagtttgtgtccaaaacctgtgattgaaacgaagaaggtaagcgatgcaaatccagacgcgattattacgaccattgtagataacgaggtgagtcgcgataatgtagagaaatttgggaagtctcgtggctatgatgtggcaattggacaagatggtatagattttttcattaaacttacgccgaatgtagaacctgcaccggaaattggttgcaaacctatgaattatagtgaccgcatcattttgatgacgaaagattatcttggtgaaggtagtgaagaacttggccgtaatttgatgaaaaccttctgggtgtgcatggttgaagccgacgtgaagccatctacaatttatttcatcaatagtagcgttaaaatggtaaccaacgattctattcatttagacaatattaaaaagttggctgaacttggtgttgaaattgctgcatgtggcatttgtctcgactattatggtctaaaagatcaagtgggggtaggctctattacaaacatgtatgcgattacagatgctatcgttggggaaaatgttgttaaactataatactcgtatctatgttgtaaatgattaagcaatattattgggggtgaggcgttgaacaataaaaagttgcttgtcgtttttacatcctattattttggggataaagcagataagatattaacagaactttcggtgcctcaccaactgatggctacaccgccagaattgaatgatatgtgtggtttgtccattcaaatagacttgaatgctgtagaacaagttcagactatcctaaaagaacataagattagtacgtcaggcttattttggtatgaaaaagggaaaccagttttagcttataaagattaaatcgatttattagtatcgaaatttatctatatatgataacattaatatataaaaatcgtattgtataggagatatacatggttgattttaccttgcctcgcgaatatatagacgatatggtcgtccgtatggcccatcatagtacagcaatcgaggggaatacgttaacacaaggggaagcaaagagtatcatattagataatatgataccccgtaaaatggatttgcgtgagttctatgaagtatctaattatcgcgactatttagtattcttgatggaatcatatcaagaagtaattacgatagatatcataaaagacacacaacgattgttactagcacatatccgtgatgataatgggcaatttaaggttgttcaaaacatggttattggtgctgattttgagccaacaaaaccatatcaagtacaagaagctttaaaaaactggtgtgataccttgcaatatcgtttagagatatccccaaatgatgaagagcgggtgcgtgccattatggaacaacatttgcaatttgaacgtattcatccttttgctgatggtaatggccgtacaggaagagctcttattgtacacgcttgcttacaacagaaattagcgcctattatcattaacaaagatgatagaggtgaatatatgactctgttaaatgatggtgatttaaatggcttatataagttaggtctcgatttattttataaggaaaaagaacgtatgattctatttggtcaaaattttggctaatgcgcatcatatgttatgtatctaggttaagtttttggaataatgtaatgaaaggttgaatttcaatgagcaaatatgaaatagaaaacgtaaaattaacagcccctaaattggatcgtaacgatttagaatatgctatgacatatcgttatgcatgtaaaaaattcgatagcactaaaaagatttctgacgatgattggaatgcgattctgaatgcagcgcgtttgtctccaacatctcttggcttcgaggcgtatcaattgttggtgattcaaaatccagaaattcgagaaaagatgaaagcttatggttggggtatcttagcagatcttgaattcgattcatcatatattcgtcatattcaagaagaggtgaaacaattaccagctgaagttgatgctgcatatcgtgaaaaatatgctcaatttacaaaagaagattacaaaacatttgaatctgaacgtgcggcctttgactgggcatctaaacaaacatatattgtaatggcgaacatgatgactatggcagcgtatgaaggtttagattcttgtgctttagaaggttttaatcaagataagatgactgcactcttaggtgatgaacttggtcttttcgatactaaacattttggtatttctgtaatggcagcctttggttaccgtgatgaagaacctcaccgtaataaaacacgtcgtacaatggatgaaattgtaaaggtcgttgaatagaatatatcaaaatatttacaagaagaatgttaggaccatagaacactacttttgctaaagtatgccaactttatatatcgaacttcatttaacctttaaaaatgaatggtacgttataaatatacagaatattttgaatgtttaacatatctgtatatttagatgatttttaagatacatgtatataagcgtaaaggagtgattatatgttatggtcaattattgttggtggttttatcgggttcctagcaggtgccatcactaacaaaggcggtgcaatgggcgttatcgctaaagttgttgctggtttaattggatcgtccgtaggtcagtccctatttggtacctggggtcctagcttagcaggtatgtccttaattccatctgtattaggtgcagtcattattgttgctgtagtctcatttttcttcggaaaaaggggatagtaatctacttataaaagtaggtctaatatagctaaacgtgattttacatgaaaggagtcactattatggcattagaagaaaaactcaaccaagctaaaggtgcactaaaagaaaatgttggcaaattaactggtgacaaaaaattggaatcagaaggtgctgtagaaaaaacaactgctaaagttaaagacgttgtagaagatgttaaagatgctgtagaaggcgcacttgacggcttgaaaaactctgttgataacgataaagaataaactcgtgtttattcaacaatcacataaagaaaatctcattaagagacaacaaaaaccagtaaatcgttcgatttactggttttttattgctattaatttgcattatacgttgaagcggaagtgtgttacgtcgccgtctttcataacatattccttgccttctaggcgaacaaggcctttttctttagcagcattttggctgccgcaagcttgtaagtcatcgaaggatacgatttcagcgcggataaagcctttttcaatatcggagtgaatttttccagctgcttgaggtgcttttgtgccgtttacaattgtccatgcacgagcttccatttcaccagctgtaaagtagttgatgaggcctaagagtgcataacttgccttgataagcttagttaagccagattcttcaagaccgagatcttctaggaatgcagcggattcttcatcagataactcagcaatttcggattcgatacgagcggatacaacaacgatgccagcaccttcgttcttcgcgtattcttctacgcgttttacgtgctcgttagcggagtaatcagatacttcatcttcagaaatgttagcaacataaagagatggttttgctgtaagtaatgtcaactctttaatcatttctaactcttcttcgttaagaccttgggcacgaactggttttgcttcaccgagaccttcgataatgcgttctagcaatggtaactcagcgcgagcatctttatcgccggattttgcaattttttcaatgcgttgtttccgtttttctacggattcaaggtctgcaaggcagagctctgtattgatgatttcgatgtctcggattggatcgatagaccctgcaacgtgagtgatattagggtcatcgaaacaacgaataacttgtgcaattgcatctacttgacgaatatggctaaggaatttgttacctaaaccttcgcctttagatgcaccttcaacgagacctgcaatatctacaaatcgcatagcagcagggaggatgcgtttggaaccgaacatttccgctaatacagctagacgactgtctggaacatcaacaacacctacgtttggctcaattgtacagaatggatagttggcagcctcagcgccagcttttgtaatagcgttgaataatgtacttttaccaacatttggaaggcctacgatgcctacttctaaatttgtgctcatggtaccacctttattaaaattaatttcgttctttgtgaaagctttcattagaaatattgtttcttataaaagccttgtcaaacacatattatatcatattctaatggatatatacatttctatagaattagtctagattatttatcaagaagtgctataatattagagagaaagttgaagtttcttataaaaaataatgataagtagatgtatttatataataaaaatataagtttttcttatgatttgttttatagaaaattttgatgagtagatatgactatgtcagtgtgcaggcggacgtgtcattttgattgaacgtaaacgtcatgtaacgctgctaggaaaggaagttaagtatgttttctaagttatttgatagttttttagttcactatttagaacgttttaatgatcactgctttagtgtaaaagtgggtgacaatgaatataccattggcgaaggtacacctgagtttaccattcgtgtaaaccgcgatatccctaagaaagatttgctcgtttctgctgaacttgcacttggcgaagcgtatatgcgtaaggatattgaaatagaaggcgatttattcaaagctctctgtgttgtactaggtcatgttaataaggattctatcaataaaaaggtacttagttctctctttaatgtaggtcttaaaaagaaagatcaaaaacaacaagtgtcttctcactacgaccttggcaatgatttttatagcttatggcttgataagacaatgagctattcttgtgcgtactttaaacatgaagatgatagcttagaagatgcacaataccaaaaggttcatcatattctcgataaattatatttaaaagaaggtatgacattactcgatatcggttgtggttggggattccttttaattgaagcagcccgtaaatatggcgttaaaggctatggttgtacattgtctgaagaacaatggaagaaaggccaagaacggattaaagaattcggacttgaaggtcaagtcgaaatcgaactcattgattatcgtgatgtagctgcatctggtcgtacattcgatcgtatcgtcagcgttggtatgttggaacatgtaggtcgtcctaattttccattgtatatggaggatgcatccactatgttaaatgatggtggtttattcttgctccattacatcagtgatccatcagaaaaagaatctagtgcatggattcgtaaatatatcttcccaggtggatgcttaccgtctcttcgtgaaattgtttctattgcttatgactatgattttaatgttatcgatgttgaaagcttgcgcttgcactactataaaacattgatgcattggtacaataatttccaaggtgtacgtgaccaagtagaaaaagctcgcggtactgaattcgttcgtatgtgggacttatacctctgtggttgtgcagcaggtttctatattggcaatatggatttgcatcaaatccttatgacaaaagatgttaacaatgaattgccattaacacgttggtattaatagatagattttaatacgaaaaaaggaccgtcttaaggcggtcctttttgtgtgtcatcatacgctgttgttaatgtaaaaagaggataaccgaagttatcctcttaaggtgcgtatagaattatagagagtgagctcgcaattcttcagcagaatgtgtggaaatccaagctggtggaatatcgaatactgtgtagcaaccagtaccaccgtgtttagcaaggcggtagataccacgagcgtatgcaacaagtgcagaacctgtgaattcagggttagaatcaagttttaaagagtattcaacaacatgacgagtgccgtcagtgctttcaccagaacgaagaacgaagccaccatgtggaatacccttgtggttgcgatcaagttcttcttgggaaatgaagttcactacagtttcgtaacctacgaagtagttttccatagttttgatttcattttcaattttagctttgtccgcatcaggagcagctactacatagcattcacgaaggtgacctttgtagccatcaacgtctggagtttcgccgttgcggatagcttcaaggtattgttctttaggaacagtgtattgacgagcatcaagaacaccatcgatacgacgaatagcatcggagtgaccttgggaaacgccacgaccccagaatgtgtaagatttgccatgaggcaagatgctttcagcgtaaacacgttgtaaagagaacatgcctgggtcccaaccgcaagaaatcaatgtagcagttttagcttctttagcaaccttgtctacatttgcgaaatgttcagggatacgtgcatgtgtgtcgaaagaatcaatacagttgaagtatttagttaccattggagtttgttcgataaggtctgttgcagaaccaccgcaaagaaccataacgtcgattttacctttgaaattaggcaaatcctccatagtgtatgtaggaacaccagacactgtttctaaacctttacgacgagaaaatacgcctacgagttccatatctggttgcaatttaacagatgcttctacgccacggcctaagttgccatagcctacgataccaatacgaattttgctcatattagcctcctataaaattataaaatgtagtgtaataactaatatacttattataacatagaaatttctctttttataatattctatagagttatacagcatatattatgtggagagaataattcgtttgttattatttatcattatatcgatacattgcgtatgggaatatacataaaagaaaacatcatatgtacaaaaattgacacatatacccctactatatatacaatgaatatatgcatattattgtgtatagtttgaggaggttatgagatgagaagaacgataaaccttgctgttattgctgctttaattattaccggtgctagtgcagaggtcatggtgtcagccactacagttgaaagccatacggatggaaaatccattgggttgaatttgtggggtgaaaataaacactataccgatgatttgaccgtcaatgtatctggccttggtgtaaatggaaataaataccataataacgttaccggtatttatgctcttgatggatcacaggttgccatagataaaaatgtaaatgtaacggttgtaaatccagcacctgcggaaagtggagagaagcgcagaccagacttagcacactattacatgagtggtatatatgctggttatggtggggttacaaatgatggtaataatgatgatactcgtattaccgtacaaggtaatgccaaagtagatgccattggcgtaggtttgcaagctaataaggatggatacattcggattctaggtggggcagatgtaaagacacatcctttaacgacatctgatacatattctgcactttcagaagaaggatttgtctatgtgaatactggcatggatggattgaaaccaggtgctaaggacgtcaatatgtatggcaatattggttttatcaataaaaactatggtattgataaaaatccacacaatcatggatcagaaatttcattgggattaacgacaccaaattctaaattagtgggtggtgtactcaatgaatttgatgaaagtaacaataatcctcatcatggcggtttgagattatatttacaaaatggtgctacatggcgtaatgaatggttaggagctgaacgtgaataccctacacaaggccgaccagatactgcaaattatctctatacaggtagtaaggtagagcatcttataggtggtgccacagaaggtagccgcggcattatccaagccgtagatgcacggcctattacgattaataattatgctggtcatacagctattgattatgaaaaaggtgcacctgctgcagaaaacggaaagggtgaagtggttatcaaccatgctgatcctggttcttctgttacattgcgtagctccgtagatgctttgaaagcacatgctaatgccgagattccaggattagcagaaaatcaatttgtgaagaaaatagtctacaatggatatacgaagggtgagcgaaaccttggtgttaatgtgcatttagaaacaggtgtgattagtcctacattaaatgctaaacttagcccggatgattttgatgcagctggacgtgctatggtgtctaataaaaccgtattatccactagtgaaagtgaaattgtatccggtgctaagagtgcattagcatcttctgttatgcaaatgcgagctgataccaatgatttacaacgccgcttaggtgatgtgcgtcttaactccgataatcaaggcgtatggggcaaatatattggtggtaaatctaaaattacagactctgcctatgtaaatcaaaattataatatggcgcaaattggctatgatacgaaacgaggaaactggattataggcggtgccttcttgtatggtacaaataacagtgattatgcactaggttcaggttctggtaaaactgcggggctagcaatctatggggctaaacaatttaatgatggccgttacttagatattattgctaaaggcaatcgtttgaaaaatgattttaccgtacataacagtttaggaacgtcgttgagtggtgactaccgtaatacgggtgcatctttgagccttgaatatggtaaacgtatcaagagaaataatggtttctatatcgatcctagtgctgaattaatctttagtcgcttatctggtgaaagctttgatgctcgtacgaatactggtagcaccgttcatattaattctgatgcggttaattccgctatcggccgcttaggcattggcatcggtaaggaagctaagaatagtaatgttttccttaaagctgcattggcgcatgaattctctggtaaaatgaaatccacttatagcatggccggtgaaccaacgactaatagcgtagtagatttgaaggatacttggcttgatcttgaactcggtggttcatggagcttccgtccaaatacatatttatatggaacatttactaaaaacgttggtagtactgttgatacatcctatcgtgtagatgcgggtattcgtcataacttttaattagtatctagatttaaaataaaaacggttgtgaaacattcggagagaaggtttcacaaccgttttgtattacatatttttagttataaatgtattagaactgtaaagttttgatgcgttctacggcacggattgtattttcgcggctgccgaatgcagttaaacgaaggtaaccttcgccatgtggaccgaaaccagagcctggtgtagacacgatttgtaccttttcaagaagaagatcgaataattcccagcttgtcatgttgccaggtgtttttaaccaaatataaggtgcatcagtaccaccatatacagtaaggccaatggattcgaggccttctttgatgatgcgtgcattttctttgtagtaagcgatgtttgcgcgagtttgttcgcggccttctttggaatatactgcttcagcaccacgttgaacgatgtaaggtacgccgttaaatttagtgcattgacgacggttccacataggattcaaaggttgacgttcgccagatttagttttgcctgttacctcttttggaacgactgcgtaggcacaacgtgtacctgtaaagccagcagttttagagaaggaacggaattcaatagctacttcgcgggcaccttcgatttcatagatagatttaacagtgtcttctgtgctgatgaaagcttcgtaagcggagtcgaacatcaagatcgcgtcgttttctttacaccatttaatccattcggctaagcgtgcacggctgagtactgtgcctgtaggattgtttggagaacaaagatatacgatatctacacgttcagcaggaaattctggagagaaattattttctgcaaatgtaggaagatatacaaccttttcgaatataccatcaacagcttgacctgtacgaccgcccataacgttggaatcaaggtatacagggtatacagggtctgtgatagcgataatattatcttcgctgaataattcttggatattaccaacgtcggattttgcgccgtcagaaacgaatacttcgtccatactaatttcgatgccatatggtttgtaatcgccttcaatgattgctttacgaaggaaatcataaccttgttccgggccataaccacggaatgtttcagctttgcccatttcttgaacagccttagtcatagcatctacgatagcaggtactaaaggcaatgttacatcgccgataccaagacgaataatgtctgcatctggatgagctgcttggtaatccgctacttttttagcaatgttagcaaataaataagaaccttgtaggtttaaatagttttcattaatattagccatgatgactccttttacaatttagaattctctctatatagtaaagtatataagaaaatggtgcaagaggtttctatagaatgtcgaagttattttttgtctaattattttatagtgtattcctatagtaaataatgtttaatgggaaaattattactcgttttatggcgtataatgaaagtatcaaatagttataatttctttataatagatagggctcttcattgtttactcataaaatgtctgttgatataatgaatttatatttaaaaacattatttgtatgtaggagttttttagtgattatgtgtagtgtagtaaattattattatggggagggaaatgataatgatagataataagaagtcaattgatgagctctttctttgtattaagagggaggataaattaaaggaatttaaaaaagcctttggtttgaagcatgttaatacagaagaatatttattaaaatttgtagcaaacttttataaggctcctattgtaaattacaaaggttatataaacggatctaagaatctttatagtgagattattgcgaaaactcttgtatcagaggatctcattaaagaatgggacaaattgaaacctgtaagacctaatcattttgatacagaccatacgcctactcaaaatgagttatcaatcaccaatcgaaaagaagaaattttagcaaaattattattctatcaaggtgaggttaaggatttaggttatatttttgattaccaaacaccattaaaaaaagctcgaagcgactcttatggaaaaatagatttattaggttataacacggatgataaatactactctgttattgaattgaaatatcgtccatctggtagtgatgaaactttactacgatgtgttttagaagcttatacatattataaattacttgatttagatcagattgtatctactgatagtcatgaaggtataagtgttttaagaaatttaaaggggtataagcataccaagaacgctgaattagttgttttatttgatgagaaggcttgtactaaaaatgatggcggatataaaacaaatttaatgttacgcctaaatccaaaggatattgctaacgcggtttatccatccaaaacagttgaaagccaacaacataaagagtgccaagagttacttacaactgataaacgtgattctttgcgaatcttgtgtgaaacaatcttaaagcaagagcctcatttaaaacaaattcgttttgctgtattacgtgtggagacggtcgatgaatcccctagcatagagcgttcataccgagcagaaacattgctaacaattcctaacaaaggttaagtatgaatataattatccatcgtggcactcatcagattggtggtagtgccatagaaattagtacagcatctacccgcattatactggatttcggtaatgaattaagtttagatgaaaagtacacacctataaatttagatatagacggtgttacaaaagggatactagattgtgatggtattgtgatttcacattatcatatggatcacttaggacaactaacctctgcattaccagaaataccattatatatgggggaactaagtaaggaagtggctatgatagctactgaacatcaagataaagatttatatttacgtttgttagatgcaaatacatttcgtggaggcgaagccttcactattggaaatatacatattagacctttggttatcgaccatagtgctgtggatagttatatgtttgtcattgaatcggaaggtaaacgtgttttatatacaggcgattttagaatgcatggggtacgaggtcatgtattagaaaagctaattaggacgtatataggtgacgttgatgtattaattacagaaggcacctcattatctcgaaatgctcatgatgggatatctgaaagagaagtgctagacgatatttcttcatatattcaagatggaaaatatgtctttgttatgtgttcctctacgaatattgaccgtattatggagatttggcataatatgccgactgataaggtattaatttgtgacgcgtatcagaaaagaattctagatacggtgattgataatgtgtactatgatagtacattgtatcgtagacctgatagtccactagttcttgatataggggcatatcctaaatattatatggataatggatttgtttccttggcaagaggaacagaaaattatatttctgaaattaaaaaattccctaaagatgatgtacgtatcatatattccatgtggataggatatattgaagaaaacctagcattgaaaactttgttagagacctacccaacctatatatgtcatgctagtggtcatgtgtctaaagatgatttgattaagtttatagaactagtcaatcctgatgttattattccagttcatactgataatcctgagaacttagagaaaatagcatctcataggagtatttatgtagttgatgataatgagccgtttattatataggacccacttgctttcattttacttataggttataatagtagagcttattaatggtaagcacttcctacccctatgtgtcgataggggcattagtccgaaagaggaggtgattttgtatgaacaaatacgaagtcatggttattgtgaaaccagctgaagaagaagcaactaacgctgtcattgaaaaagtggaagctttaattgctcgtgtaggcggcacagtagaaaaggtagatcgttggggcaagcgtcgtcttgcttacgcagtgaaaaaattcactgacggtttctacgtattggttaatttcgaagctgatccagctgaaattaaagaaatcgaccgtgtgttgaaaatcaacgatgatgtcttaagacacctgattgttaaacacgatgcataattaaagcctggaggagaaaagatgaactctgtacaaattctaggtaatttagctcgtgatcctgaagtacgttttactaaaactggtagagcagtggcgactttcacagtagctgctacgaatacttatattgactctacaaccaatgaaacgaaagaacaaactgctttcattaattgtgttgcatggggcaaacttggtgaagcggcaggtaatcttcgtaaaggcagtcgctgctttgtagaaggtcgcttgcaaactcgttcctacgagactcaggatggtcaaaaacgttacgttactgaagtggtagcgaactttgtgggccaatcccttgatatgaatactaattctttcgatggtgggtccaattttgatagtttcagtacaggcggcgatgacgaacacatcccgttctagtgtccgagactcctactaattcgaaaaggaggattcgcaatgagaagagatagaggcagaaagccaagaagaaaagtatgcgttttctgtgcagaccatatcgatcaaatcgactataaagatgttgcaaaacttcgtcgtttcacgactgaacgcggcaaaatcttacctcgtcgtatttccggtacttgcgcaaaacatcaacgcaaattgactacatctatcaaacgtgcacgtgcaatcgctttattgccattcactgcagaataattgatgaatcaaggcggtataaccatttggttgtaccgcctttttgctacataaagagctggttctgtatggactggctctttttcttagattgtggtatattttgcaggaaaacggtgtttctgtagaacaaattgtagctgatgtaaaagcattgctaagttaaaatcgctacagaatataacttatataaatattgtttataaatgaattgaaaagtagtagttcttgctaattagcatagaaactactactttttgaatatatgaatgtgagttataaatagtatttataaataaaatattttatagttttttatcaatatgactataaataatagatgaagtagtatataataaaaatagactgacccatatggatgtatgatacagttttactaatttataaatctgtattggttagtatatgaacgtaaatgtgcttttgttggtgtgtaaagggagatttggaaacattgaaaaaggttttaactttggccgtggctttggctgtagtcagcagtggttatctgtgtgaggtaaatggtgccgcagaaccgataaccaaaaaagcgccttccatctcagaatttaatatatatgtgccaaaagagctcaatgaacgtcaaaaagatcttgttgaaatcggacgttatacagctagcggagatcttggctccttgagagaaacgattatttctgctattgaacgcggtactttgacacctcaagaggtaagtattgccattcgtcagttgtactctgcagcgggtttaaagcaaatgaatgcggctcttgctacatttgagcaacttcgcgaagaacgccctgagtttggtgtagattatgataaacttgtgccaaagcgagtgggcttaagtgctctactaggtaatggctcaaatagtacaaatatggctgccaaaattaaagctgatgaagcatcaacagctgtaaaatataatacattccgtattaaaaagccaaaaccacaaaatagaaatagatcacgtctaggcaaacttgatcgtgaactcgtagcagcagcggcattaggtactcgtgttggtaaatcaaatgcggtatttgctacatctaagaaaagtttaacagagcttggtttgagcccacaacaaattgaatatttagaaaatatgctatctaactaatgatgagcccttgtcttttcataatgacaggggcttttttatattactaattgacgtaaagtaaagcatttttctataataataaggataggtaacaattagttatataacataatactttcagaatagatatataaggagtaacgatgcgtcttcgtagaaaaccgtggattgatgaggctatccacgagtatgattcacacattattttatctggacaagaggcttacaaaggcaaatggagagaggctttttcgcatccagaaagaccattatacatggaactaggcactggtaagggacgattcattgcgggcatgtctgaagcatatccagatgcaaattttgttggttttgaggttcaaatcggtgtaattttctatgcagcacaaaagattttcgaagctcaacgggataatgcaaaagtatctttgtttgatatcgcaggaattgaagaaattgtagcccctggcgaagtagatcgattctatatcaatttctgtgatccatggcctaaggctaaacatgctaagcgtcgcttaacatatcatacattccttgatcgctatgcacgtttgttaaaagataatggcgaagtacactttaaaactgataatgaagacttgtttatattctctctagaggagttcaaaaattgtgggtgggaactcaagaatgtcacctatgatttacatagtacagacttaccgaatgtaaaaacggaatatgaagagaaatttagcgcaaagggacaacctattttccgattagaagcagtgaaaccgactgttactaaggaggcataatatggtgcaaaaaggggaaaagaagggacacttttgggagaaagtgtttaagaacgacctacaaggcatgttattgcctatagcgcttatggccttgattggtagcattaatatctttagtgccacctatgttgggtcgattacaacagatactggattgttgggttatgcaccgagacatttaggttatttattagtttctgctattttgggtgtccttttatatcgatttgattatcgtcgattacaaaatgctaaattactgacctggataatgggattgaccgcagtatccttagtggctatatatttggtcggtgtagaggtcaatggtgcgcgccggtggatttctcttggcctattctcgttccagccatcagagtttgctaaattggctgcactcatgtggacagcagctaaattggcggataaaccgtgggtaaaacccagatttacatctatgattaaacctaagaagggtttgtctcaaaaagaggtagcattaggttatatttttgaacgcgtaagatatatgtgctatatgttgctttggccaatcatatttgctttgctcaccattaaacagccggatatggggactgccgtattgattataggtttctcctacctgttaatattcttatctggctttgagaaaagtatatttggcttatccttgatgggggctattgtcgtaggtatttatgctgctcgtagtagttcgtatcggtgggaacgtgttgtatcttggtttgatccctggtcctatgcacaggataaaggctatcaaactgtacaaggtttgttagccgtaggctcaggtgggttctttggacaaggccttctgaatggtacgtcaaagtatttctatctacctgaagcacatacggactttgccttcgctgtttgggcacaggaaatgggctttttaggcggtattctggtcgtattcttaatggccatgtttacgtattttggattccgtattgctaatagagcacgcgatgcttttggtagatggttagccattgggattacgattctcatcagtggtcaagcattcttcaatatcgccatggtttgtggtatgttgcctgtaacaggtgtgccattgccattcgttagctatggtggttcttctctaatgatgaattgtttagctatcggtattttagcaagtattgcgagacgtggtgtagaaggtgttaaaccagtaggtaataaggaaacattgccgtcgttgcgcgaggaaacgcagagtcggtttagaccgaatagaacggttgaatctaaattaccgggacgttttgtaccaccaaataaacgataatatatgtgttgtgtatgagggaaaattatgaacgattttattgatattcaagaacgcccatcattgggtaaattattgccacttagctttcaacatttatttgctatgtttggctctaccgtacttgtaccgtatttgttgaaagtcgatccagcaacggcattatttatgaatggtattggtacattgctgtacttatttgtatgtaaaggcaagattccagcctatttaggctctagttttgcttttattgctcctgtcagtgcggtattggctgcaggcttgggttatgaggccgctaaaggtgcctttgttgtatttggcttatcctttgttattttatcgttcttagttcgctatattggtatcggttggattgataaattattcccaccagctgcgatgggggctatcgttgctatcatcggtcttgaactagctccagtcgctatgggtatggctggacttatcggtgatcaaaatcttggcatgtctcatgagcaggctatcatagtatctatgttctccttgattgtgaccttgttaggaaccgtcgtattccgaggattccttgctgtaattcctgtgcttatcggcgtagtggcaggttatatcttatctgctatcatgggcgttgtcgatttctccgctgttgaagcggcaccatggttctcgctaccacagttttatggtatgcctgaatttgatatcaatgccatcgtcatgattatgccagcattatttgtagtatttgcggaacacgtgggtcaccttgttgttacaagtaacatcgtatcaaaagacttgatgaaagaaccaggtttacaacgttccttgctaggtgatggccttgcgaacattctttctggtttctttggtgctacaccaaatacgacatacggtgaaaatatcggtgtcctcgctattactcgttgctttagcgtatgggtaattggtggtgctgcagttcttgcgatgattatctcctttgtaggtaaagtagcagctcttattcatgctattccagttccagttatgggtggtgtatccattctcttattcggtatcattgcagcatctggtttgcgcatgcttgtagaacgcaaggtagattatacaaaccctgttaacatgattcttacatctgttattcttgttgtaggccttagtggtgcacagctcgtaattggtcctgttgttttaaaaggaatgggcttggccactgttgtaggtatggggatgagcattgtacttcttatcctacaaaaaacaggtattggtaatgatcaattaaagaaaacggatgtataattgattatacatttaactatatagcaagacttataattaacgcgtagcttttcggctacgcgtttttgtatagtgggcctttatatatatcatagaagcgtgtctattggaaaaatataaatggctattgtataatatattgtatgaaatgttttgtgaaaggaggtttatatggattatattttttggcttattataggtctcgtattgatggctattgaactagttatacctggtggtattgcgggtcttatcgggtactgtttgtttatgtggggcgtatttatcggccttggtggtacagatatagccttatatgcggtgcttggtatcacgattgtattagtcgtggtattattaaccttctttaatcacttttcaaaaacctggattggcaagctctttaccttagggcaacgatctacgaccaaggctggctatatatctaatgatgtattagaggacttagttggtaaagaaggtgtagctcatagtacactgcgccctgcaggtattgctaaaattgatggtaatttggtagatgttgtaaccgaaggggacttcatcgatgccggttcacccattgtggtgcttcgtgttgtaggcggccgcaatattgttagaaagcgcgactaagctttcaccacatcgtcgtatataatggaggttactatggatgtaggtattttaattttgattcccattctactgattgggattatggtattcttgtatgttgtgccattaggcctttgggtatccgcattggcagccggtgttaacgtaggcatttttacattagtcggtatgcgtttacgtcgtgtaaatccatctcaaatcgtaatgcctttgattaaggcgaataaagcaggtcttgaggttaatgtaaatcaattggaagcacattaccttgctggtggtgacgttgaccgcgttgtagatgcattaatcgctgctgaacgcgcatctattcctttgacatttgaacgttctgctgctatcgacctcgctggtcgtgatgtattggaagcggttcaaatgtccgttaatcctaaggtgattgaaacaccaatcatttctgcagtggcaaaaaatggtattgaacttaaggttcgtgctcgcgtaacggtacgtgctaatattgatcgcctcgttggtggtgctggtgaagctacaattatcgcccgtgttggtgaaggtatcgtaacaactgtaggttcttctgaagagcatacagatgtattggaaaatccagatcacatttctcgtactgtattgggtaaaggccttgatgcgggtactgcattcgaaatcttatccattgatatcgctgacgtagacgtaggacgtaacattggtgctcaattgcaaacagaccaagcggaagcagataaaaaaatcgcacaagctcgtgccgaagaacgccgtgctatggcagttgctacagaacaagaaatgcgtgctaaaacacaagatatgcaagctaaggtagtggaagcacaagctgaagttcctaaagcattggcagaagctttcagaaacggtaatcttggcgttatggattactacaatatgaataatattattgcagacactaagatgcgtgagaatttagcagatggtgaataggagtagctatggactctattttgtctacagtactatcggcctttacgcataatcctatatttgttctagctataattgcttatatcgtgttctcttttttgaaaagctcaaagactgaagatgctgatgagtatgaaacctcaggtgctgaaaagacttgggaggatatggagcgtgaatacggtatttctattgaacgtaaaatagaagaacctccggttaatgctacatctaatgatgctgtctatcagtcgtctaatactcagatttcttataatcaatctgcagaacaacctaaaaaagagcaacctaaacaacgagaagaacataaagtatctactagtaaaacggttgcagtttctacattgactgagcgcctagcagaatttaagcgccaaaaagcaatggaagaagtaaagattcctcttgttgatgtagagactcatacgaagcctgtaacgaagaaggctcgcaagtcgcgtcatgatattaaagaaggtatgaaatgggcttttatattagaaaagccgaaggcattgcgtcatagggctcgataatgtatatctgttcctgataaaggcagggttcccaatggtcaccggggtgactattgggaaccctttttctattgctaagactataactagtctttcataataagtgtaataggtgggtggatatagttcgcctaaattatgtgaaaggagtgattatatgtatcgcagcgtacgaaatattccaaaacaattattagagaatctatatgttaaagagaaatggaccttacgagacattgccgattatattgggtgtagtgtagatacaattgtaaggcgtatgcagatgtataagattgcgcgacgtgaaacgcgtaaagatatcaatcgcgcaaccttggtaaatttatatgaagtgagtcatacgagtattgaagccttggcccgtcgttttaatgtatccactgcgaccatatctaatcgattacatgagtatggactgttgtgtactcatgatcattctatacatagtgtagaaccagatcgtattaaaaaggcttatgaaagtggtaatagtacaactcgtattgccgatatgatggggctttcacggtggaaggtattacatatcttacatcacatgggtgtcaatatacgcggtgggcggcgtaaggtgatgcctatcgatgaaatgagctatttgtatagctatcatgggttgagtacaaaggatataggtgttgcctatcaactgcaagctaatacggttgcattatatttacgagaatctggtgttgcattgcgtggtaaacggttagaggtagatacgaatgagattagcagattacggatggaaggattatccattgcagctatcgcacgacaactcgaatgttccccgtctgttataagaaaccgattaaagcagcaacaaacttagtaaagacgtagtatagtatggtgtcgtatggtaaatctatataaacctcaactcattcggtatagaaatttgtagttaattactatatacttagatttatatgatgatgggaggtttattatgttcgaatatttaacattattattaccatttttactgctagggttcatcgccgctggcctatctagaatatctggtgtggcgttatccatgattatcgtaccaaccttgttgatttggggcgctacaccactagatgtggttgcgtttatgctcctctttgtagtgtataataattttacatctgaaacacaagatgtacgccttgattacaaggatctcgtattatttcctaaatggcgcttgttaattcctttagttttgacggtagttggtatcttcattaatccagctattggtattgctgtctttatggcttgctttgtattggaattgctagcaaccgtgttcaaacgtattcctgaacaggaacgtcctgctgttcatcgcgttattgtactttctgttctcagtgctattgtaaccgctattggcgcctatgtaggtcctactattagtggggattactattttggcttagttggtttagccatcttggccattactgcctttgcttggtatgcaggccgtaatcgaaatgcatttaaaggcatttgggaatttatctgggttgatttcggcattttgcttggtttattcggtattgaaagctccaactatccatctgggttgactcgagactataagagttctatggatcgtatgctaccaatgattactgtagtaggcggttatgcgggattgatggttatctttggcgtatatggcatgttctcattgccatcctttattactgccattggtgcggccattggtatacgcttgttcggcttgtacgagttccctaaacgcggcaccttctcttacctagcaattggatttgctatagctgccgttgtatgtttatatctcgtatctcctgtaccaacaggatttgatgcggtcaatacgattatgacccaacctatggttcaataaaaggtgagttttatcatagtatcaatcatctaaacttgttaatgtgagagtagatagttaacataaacaataaggagatgtgtatcgtgaaagataatactactgttgaagtacattctaatgaagttgtagagacgagaccatttccgccattcttgccgaagaatgcaacggttatgatgatgggaacatttccaccaacatctgaaaagcgagccatggaatttcattatccgaattttcaaaatgatatgtggcgtgttttcggtttggtgttctttgatgataaagaacattttagaaaaggggaagaaaaagcatttgatgcggaaaagattaaagcttttttatctcaaattggtatagcttcttgtccaacggtattgaaagctattcgtgagcatggtaatgcatctgatgcgtttttaaaggtagttgagcccgttcctctcgctgacgtattagcacaaataccagattgtactcatattggtacaacaggtggcaaggctacagaaatcttacttagtttattacctgaaaaggtaaaactacctaaaacaggagaaacgactccttttgtttatgaaggtcgagaactttctttgacgcgtttgccatctacctctagagcctatccgttgagtcttgtgaagaaggcggcggcttataaagcattttttaaagcttgtggattagaaacaaaataattgaataatagtaggatacctttgatggtctattctaactggtaaattagagtagaacctatcaaaggtgtttttattattaaaaatttacgtaaataggtgatatggtaatttgcttattatatataaatctatgagattagtcataattaaaagtgataacaaaaataactatttaattcttgttttttatgatgagaggtctataattaaccaatgtcattatatggttgacaaatattttagaaataggagttgatactatggataaggctaaggaggccttatggacaagatcgtttgtcctcgatactttgattaatttcttagtatttttgatttattatttattaattgttattattgccgtagtggcaaaagataaccttcacgccacagccagtcaagcaggcttagctgttggtatatatattatcggtaccgtcgtggcacgattgttagcgggacgctttattagtgtcttaggttgccgaaagatgctgtacttaggtttgtttatttatttggcttcaacagccatgtacttctatacacctaacttgttaatgctcgatagcgttcgattcataaatggttttgcttacggtattacatcaactgcaacaagtacgattattgctgctattatacctcaatctcgtcgtggcgaagggattaactactacggtttatctacttctcttgctgctgcagtaggtccattcttaggtattttaatgcttcacagtcttggctatgattttatcatcgcattctgtgttgcacttatcgttatttgtggcattggcgccgtaattatgaagtttaaggagcctaagcttgatatcgattctgaagctcataagggcattaagatttccgattatattgaacctcgtatgaattctattagccttgtttcagtgcttgtaggctttgcatactctggtgttatcggctttatggcagcctatacaaaagacttagatcttattatggcaggtacattcttcttcgttgtctatgccgtagttatcactattacaagacctttacttggtattctatttgatatgaaaggagaaaacttcgttttatatccttgcttcgtatctttagctcttggtattttcttactatccattgctcactctacatggcttgtacttttatccgccgtgttcgtaggtcttggatatggtacattcatgtctaatggtcaagcggtaacagttaaaattgtaccaattcaccgcattggtgttgccacatcaacatactttatcgccttggatgtgggccttggctttggtccatatatcttaggtgccattaaagaagttgtaggttatacaagcatgttccatgtaactgtagtagttgcccttgtagctttagttgcatattacttattctacggccgatatgtaggaaccgacaaagacctttccttgaaagcacgtgctgaagaagaacaaattagaaatcgtaaacgtaatggtaaacttgcgtagaacaatgttttacattggatatataatttcatagagtaataaaaaatgactattcgagcagttgctcggatagtcattttgctatcttatagtattatttttcgatatttacaatgttgacgataacttcaacagcttttttcatatcgtcgatacatgcaaattcatgacgaccatggagattttctacaccagtaaaaatattaggtgttggaatgcccataaaagaaattttagagccatcggtaccgccacgaataggatcgcagataggtgtgatacctgctttttccatggctgctttggctacgtttacacattccatgttgtctttgatgatatcgtacatattgtaatattgatcttttacggagacttcgcaaacttcacggccatagatttcatttaatgtttgacctgcttgtaggaaaaatgcttttttcgcttcgaacaattctttgtcatggtcgcggatgatgtagttcatcttaccagtatctacttgtgtttccatgctcatgagcataaagaaaccttgacgaccacaagtgtgttcaggaacggccgccccaggtaataacgcgtcaaattgcatagccagtttagcacagttaatcatgataccctttgctgtacccgtgtgaaccgatacgcctttgagcgttacagtaccgccagccgcattgaatgtttcatactcgagttgacctaggctttcaccatcaatcgtataggcaaagtccacagggaattgtttcacatcaaagtgatctgcgccagtaccaatttcttcatcagggccaaaggcacacatgattttaccgtgtttgatttctgggtgagccacgagataggagagggcttccataatttcgcagatgccagccttgtcgtcaccgccgagtagtgtgagaccatctgttacgaccaaggacttaccaatatagttctttaaattaggaaaatctgtacgacgtgtgaaaatttgatgttcttcgttgaggcaaatatcgttgccatcatagttttcaatgatgcgtggcttaatattttctgcgttatagtcggccgtatccatatgggcgataaaaccaatggaaggggcctttgcatctgtgttagcatttaatgtaccgatgacaaatccgttttctcgattgtagatgacctcatcaagaccaattgctttcaaatcagaaacaagcacattggtagcaaaatcaacttgcgtttgcgtactgggaatcgttgtactttcctcgttagaccgtgtatttatgcttgtgtagcgtacaaaacgttcaaccattggttccataataagcctccttgagagaatgtattgaatatataattggttgataccatagttagacctatttagcctatatatcttaattgtagactagtagtacataaaatgcaaagtctatcggtgcataatgtgtaaaaatattcgtattatgcatataaagcaattgaatcgtatataatgccgtgatagtataaaggtggatagatatacgtttgtgttttttatgaggaggttttactatgtcggacgaaactcgttctattccgcccgtagaaccggtacttgatcctaaaaaggactacgaagaaattaattcatacgtagtattttggggcctgttctatgcagcaatctttacactggctgttggctatctatgtttgaaaattggtcaaacagtagatgcctttgctccagtatctgtacttgccatgggtacagcagttattttgaaacggaaaaatgcgtttgctgaaaccgtacacattcaagcaatcgccagctctagtacaaacacattagctggggctatgttcttcttgccagccctttacatttggggtgtaacagatgtaacctttacacaaatggcaattccaattattctcggtggcgtacttggtgttctattatgcgttatgttccgtcgctattttgtagaagaaatgcactatgtgtatccattcccaagcggtcgcgctgcagctgaagtattgatgagtaatgaaggtagtaaagctaaattgatgttaggttctggccttattgctctcgtatatgactttattctaaacagccttggctggtgggaagaggtcattcgtacagctacgtttaaatggggcgctgccttagcagaccaaactaaattgacggctgccgtagacactgatgcagcgttgctcggtcttggttactttacaggccttcgctatgcagcgattattgcagcgggctccttcttctcttggttcgtatgtattccaattgtatacttcttagcgccagaacatgtgatgcacatcaatggtcaatctgtatttttagcggatgctccaattcgtaaggtattccttgattatgtgcgtcatattggtatcggtatgcttgctatggccggcatcattggtcttttgagcatgtctaaggtggttggcagcgttgttaaaaaagcagttttagatatattcacatccaaaactacagaagttaacttgctccgtacgcaacgtgatgttcctacatcttggattggtgcaggcatcttgttatgtactgtgttatttgccgtatacttccactttatgtattctgaaagcctcgcgcaaacaggcgtagcattcttaatcgttctaattatgtccttcttacttgctgtagtaggtattagctctattgcgtatactggtacagaaccggtatccggtatgacaatctttatgattatcatttctgctgtatgcttaacagctgctggtatgactggtaaagtcggcatgattgcagtcctcatgatggcatcctttatcggtacaaccatcggtatggccggtaactttatgtcagaacttaaggtagcgcacatgacaggtgctacacctaaaaaaatggaacaatggcaaatcgttggtaccattctctgtgctgtactttctgtaggtgtcatgatcttattaaatggtgcctatggtttcgtaggggaccatgcattgaatgctcctcaagcgaatgcaatggctgctatcattgaacctatgatgactggtggtagtgcacaatggcctttatacatggcaggcgcattgtttgcaatcatcttatggatggtgaaagttccaccgttggcatttgcattaggtacatatctacctatggaaatcaacaccccattactagttggtggtctgattgcatactttgtacaaaatagtacaaacgataaagcgttggcagaccttcgcttctccaaaggtagtacaattgcatctggtcttgtagccggtggtgctattggttccttgttcagtgccgtacttcgtattgcaggtattgatgtatttgctcaagaatgggtagaaacaccagaagcaacatacctcagtattgtaatgtacttgttactctgtgcattcttgtacaaggtagctatgtacattaaagctaaaaaaacagctaaataacatgaatcctctctaagaggattatgaataacgctctctatgaatacaattcgtagagagcgtttttatatggagatgacttggggattgtcttagatatatagatataatctatattaaataaaacatatttatatagtaggaattattgacctaggatatatatagtgatatgatatgtttatgttattttattttagagtaaatctatagttgttagattatgtagaaattttatttagtaataggtatgagattgctagcaaaattccaaatgcggatgtacgacaatttaatattattgttgatgcctttttggaattagagaataaaggcgtagatgtagttattaatgatacgccagtaaatgagtattatgtaaataataaaggccgtggcattgctaaagtaaccggtgaggactatgatgcggcgccacttggtattgctgtgaaaaaaggtaatacggagttacttggtaaaataaatgatggattagcaaaaattaaggctaatggtaaatatgcagagatttataaaaagtggtttggtaaagaaccacctgcagaagatttgaaataggtgatagaatggctaaacggaaagcatttttgaagattgtaaaggaaaatggacctcttgtactagatggtgcattcggtacagaattagagcgtcatggatgtaatattcatgatgagttgtggtcgtctaagatgcttattgaaaatccagaaatcatcaaaaaagtgcacatttcctacttggcagccggtgcagatattattgaaagttctggttatcaagcaactgtagccgggtttaaagctcatgggtatggtacagaagaagcactagatttggtgaagttatccgttcgtttagccgtgcaagcacgtaatgaatttttagaagctaaagcgaatgatgcgcttacattgcgtggtattacattaggtgaacaattgccagatggcagtgtccgttacttctctgaaggggccttaccaaaaccattggtagccgcctctgttggcccatatggtgctttcttggcagatggatcggaatatcgtggcgactacggtgtacaaaccgaatatttggaagtgttccatattcctcgcattgcattattctgcgaagaaaaccccgatgtgttagcttgtgaaacggtgccgtgctatgatgaggccattgccattgcccgtgctttgtgtgatccacttacgacaaaaggcattcccgcatggatttctttctcttgcaaagatgaacatcatatctcaagcggagagaccatcattaaatgcgctgaaatgatcgataaggtgcgtcaagtaacgggcatagggattaactgtacagcgccggaatatgtagaatccttgattaaagatattaggtctgtcacaaataagccaattgctgtttatccaaatcttggtgaaacctatgatggagaaactaaaacatggtcaggcggacaacaaagctttattgactatgttgatgtatggcacaaggccggggctaatataatcggtggatgttgccgaacaaatcctgatatcattcaagaagtagcaaaacaaatacatgtaaaataaatgagagggactgtataagtacagtccctttttgcttgtatataaaaaaagaaggttatccatcggataaccttctaatatatggcggagagacagggatttgaaccctgggtacggtataaccgcacacatgatttccaatcatgctccttcagccgctcggacacctctccatgtattctgttgtgtaacaggtacttgtatagtatatgaaaaagttagatttatgtcaagaacaaaatagtagaattattatagtttcataagagttttaaaaagccgccccgaaggacggcttttagtatgtatattataatacttctttgatttcttgtgcatcgatagatgctttgatatcgtctgccattttttcgattaatgggatatcttcttcttttaaagaggatttgatatcaagaggttgggatacgatttcaatatctttgaagtcgttttcgaaatgagcaaccattgttttcattgcagcggaagcccaggaatgattaccgatgatggataccttatgattttggaagttaagcgcttttaactcgtgaatgaagttttccatagtaaggtataggttcaagttataagttggtgcaattgttaccaagtttgtatatttccaagcatcagcgatgatgtaggaaggattagttttggaaacatcgtagattttaatatctgtaacaccccgtttagacaattgtttagccaattgttgagcgatgtcacgagtgttgccatacatggaaccgaaggcgataacaacaccttttttctcagctgtgtagctggaccagtgtaagtatttgtgcaagatatattcaatcgtttcaggtgtacgccagattggaccatgaagtggagcaatgcgtttgatttcaaggccggaaaccttgcgaattgcattttgtacttgaggaccgtatttaccaacgatgtttgtgtagtaacgacgagcttcatcttcataggttgctacgaaatcagtttggtcagcaaagatgttgccattgattgtaccaaatgtaccgaatgcatcagcagagaacaatgttcctgtagatttttcataggtacaagttacttctggccagtgaaccataggcattgtgtaggatacaagagtatgtttacctaagcaaatttcgtcgccttcttttactgtgtaatattgatcaggctttggtgtgcggtagaattgttcgaacatgcggaatgttgttgcattaccaaccattttacaatttggatagcgttccaatgtttctaacaatgtttgacagtggtcaggttccatatggtttacgatgatgtaatcaagatcacgaccatttaaaaggtgggataagttgtcgaagtattcttcgcgaatttctgcatcaacagagtctacaacgcaagttttttcatcatcgatgaaatagctattgtagcttacaccatttggaatagggaataagttttcaaaacgttcagttgtccagtcattactaccaatccagtagatattatgggtcattttttgagcacaatgcatagtaatatcctttccttacacatatgtatatacataactaacctcatccatgtgatgatggtttaattaattatattgacatcttataatacagtttttttcgaaaaaaatcaatatatcgatatatgtcaatgtgttataactgtgttaactttcacatattagaatgtgtattgtgaaagtttgtaaatatagcccattccgaagaatgggccatatagattatttaaagtattttacgccggatgtgaagattggcatttctaagttgcctggaatatttttactaatatctgcaccacagcgttcggagtgcgccattttaccaaatacgcggccatcagggctataaataccttcgatagcagccacggattggttaggattaaatcgtccatccatggatgctataccgtcaaagtcgacatattgtgtagcgatttgaccagttttattgaattccaatacttgttgaggagatgcgataaaccgaccttcaccatgagaaataggaaccgtataaatttcgccagccttagcttcacacatccaaggagattttgtagaaataaccttagtgttggccatacgggatacgtggcgtccaatggtattgtatgtcaaggtagggtgatctgctgttaatgtttcaatatggccaccaggcaatagacctaatttaatcaacgcttggaaaccgttacagataccgagaactagaccatcttgtttataaagtaggttttcgaggccttctgcaagatatgggttgcggaatagggtagccatgaatttaccagacccatctggttcatcgccgccgctaaatccaccagggaacataagaatttgagactctgctaatttagctttgattacgtcaatagattcttttaattgttctggcgtttgattgcgaatcagtacgatgtctgtaatagcaccagctcgttcaaaagcacgagcggaatcgaattcacagttagtgccagggaatacagggataagtacctttggtttagcacctaaggaggtactgcgaggctttgcgtgttgatcgtgaatgtaagctaccgcttcaccagtaccggattttgcttccaatgggaatatatctgataatggtttttcgtatgctttttcgatttcatcaagtgttacagattggccgttccattcgatgataggtttgtcttgggtaactgcaataacgcgaacgtcggacaattcaagtaaatggttaaccgctgtaatatctacttctacgatgaaagaaccaatagctggttggaaaatagctcgttctgcatatttgtcaaacttaacgccaattttattgccgagagccattttggaaactgcttcagggatgccaccttggtctactacataggcagagtatacgcggcctttttcaatttcctcttgtaagatatcacaattttctttgaagtgatcccagtcaggtgtgtcgttatacgtacgaggtacatcaaagtatacgagacgatggtcaggtccttttaaatcttggcttacaatatgtttaacaggagctgttaccgctgcgaaggatacgagggtaggaggtaccgttaaatccataaatgtaccactcatagaatctttgccgccaatggcaccgatttcaagttctttttgcgctttgtaagcacctagaagcgctgctaccggtttaccccaagattctttggagtgtaaacgttcaaagtattcttgtaaagtaaggtatgcatcttgacgacgaccaccgagtgccacaagttttgcaacggataaaagcacggcatattgtgcgccatggtatggactccaagcggacaattcaggtacaaagccatgtgtcatgatactagcagttgttgtttcaccgtgaagaacgggtaattttgccaccataccttgggtaggtgttttttgatatttaccaccaaatggcatgagcactgtattggccccaactgtgctatcaaagcgttcaacaaggccttgttgagatgcagtgtttaatgtagatattgcttcgagccattgatctttgaaattgtccgcacttgcagaaccacgacggaaataagatttttcagtaggagctgtcactacagcttcttgttgttgactcgctccatttgtatttaagaaatcacgactgatatcgacaattgtttctccgcgccatgtcatgatgaggcgatttgtatcggttacatcggcaacgattgtgcactcaaggttttcttcatcgcaatacttcataaatgcatcaacatcggctggtgcaatgacgcaagccatacgttcttgagattcggaaatagcgagttctgtaccatcgaggccgtcgtattttttaggtactaagtcaaggttgatggtaacgccatctgttagttcaccgatggctacggagacaccaccagcaccaaagtcattacaccgtttgatgagtgttgttacctcagggcgacggaataagcgttgaattttacgttctgtaagggcattccctttttgaacctctgcaccacatgtagcgagggattctaatgtatgttccttagaagaacctgtagccccaccgcagccatcacgacctgttttaccaccgagtagtacgataatatcacctggtgttggtacttcacgtcgcacttgattgcgcggagcagcaccgataacagcaccgatttccatgcgttttgccacataacctggatgatagtattctttaacttcgccagtagcaaggccgatttggttaccataggaggaatagccacgtgcggcttcaacagtaattttcttttgtggtagcttgccttctagtgtatcggctagcggtgtgcgagggtctccgctaccagtgatgcgcatagcttgatacacataagaacggccacttagaggatcgcggatacaaccgccaagacatgtggcagcaccaccaaaaggttcgatttcagttgggtgattgtgagtttcgtttttgaatagcaagagccattcttcttctttgccatctacatcaacgggaacgatgatagtacatgcattgatttcttcagattcatcaaggttagtaagaccgcctgcatgacgcaattcttttacagctaatgtggccatatccatgagagaacgagcttttaccttagttgtatataataaattacgaccttcagtatattcttctagtgcttccttgattggttctgtgaaacgactctcttcgatagtaatatccgttaactctgtcataaatgtagtatggcggcaatggtcagaccaatatgtatcgaataagcgaatttctgtaatagttggattgcgtttttctacattcttgtattgcttttgaattaatttgatatctgccaatgtcatagcgagtccatattcgctaatcatattttgtagtgcatcctctgacatttctgtaaaaccgtcgatgatagctacatcttctggctcttctagtttaagtgccaaggtatcaggtaactcgagacttgcttctctagaatcaacaggattgatgtaatattgtttgattgattctttttcttcgtctgtaaaagtaccttctatgacaaatactcttgcacaacgaacggtatgacctgttgtcagtgtgagcatagaaatacattgctctgcactgtctgcacgttgatcgtattgtcctggtacatattcgatagcaaagacaaaagcatttgctggaatatctaatgtttctgctactaaatcaacaggtggttcagaaaaaatcaaatgtttagccttttgtaatgcgtcatcgctaagattttctacatcataacgttcatagatttgcacggctgtagctggtacatgtaattcttgctgtaatgtagctaatacatgtgctgcttcattagcgaaagcatcacgttttcttacaaatagtcgttgaatagccatatagcctcctgtaatatgcagaataaatgagttctggtgttgacaagattagtatagtcggtctagacttataagtaaagataatcttacttatataaagattaacgctacttataaatatgaaattttcatgaaggtcataagaccaaaatttcataaaccgtaacaatagcatcttgttttgagtaaaaagtagaatattaataatgtattactatactattagtatataacagaggaggataaaatggcagtatcagcagatctatatagatcatttttaggagttgggttgtatttgtcattttctcgcgctgcaaaagagctaggtgtttcgcagtccgcaattagtcaaagtatcaaacaattagaaggcgaattaaaaatgcctttatttgtgcgcactactaaatcggtagcatttacgccagaaggcaaggaattattcgatacagtagccaaagcattttccattctagataatgggattacgcaattacaagaacgggtgaatcaagcttacgaaagcttgaatattgccgctacagatacactatgtcgtcatttcttgttgccctactttcataaatggcaattgcaagaaaatcaaattggcttgcatatcataaacagaccgtccccagattgtgtggaaatggtcattaataaagaagtgcagttagctgtagttaatgactacgaaggtttgcgtagcaatacacaattagaagttactaccttggcgagcatccaagatatctttgtgggcggtcatgaatataaaggagcaggcttctttgaccaaggccgcttgctcagtgagcctatgttgttactacaaaagggaacagctagccgtactttctttgatgaagtaacgcatggtgcttgtagtaaaccgcgttttgaattgagtagtgtagacgttctcctcgatcttgtggaaattaacatgggaatcgctatgttgccaagtaatgtggtgcaagaaaaaatgcaagaaggtactgtcgtaaaaattgatacagatattcctgtgccaacgcgagatatcgtacttgttcggtcgcgtctcgttccacaatccgaaggcgctgctagatttacaaatttattgactaatcgtgaagataaacgagacaaagttttataaatatgaattacaaacacactttattctttttttcaataaagtgtgtttttttgttgaccctaagcgttgatttacgttaaaatttaaagatagttatgcggaggtaaaacgaaatggaattattaaaacaacgcattcgtgaagaaggtattgtcttaaacaatcgtgtattaaaagttgatggttttttaaatcatcaaatcgatccacatttatttaaagctattggtaaagaaattgctgaccgctatcgtgatgctggtgttcaacgtattgttaccattgaagcatctggtattgccttggcattgatggctgctcttgaactagatgtgccattagtatttgctcgtaagaaaaaatctattcttatggtcgatgatgtatatcattctgttgtatattcttatacaaaagaagaaaattatgacattacaatttctaaaaaattcttgccagcaggcgaaaaagttttaattattgatgacttcttggcctctggtgaagcagctatggggcttgctaaacttgtaaaagatgcaggcgatgaagtggttggtatggcaattgctattgaaaagtctttccaaccaggtcgtgaacgcttagaaaatgctggtttccgtgttgaatccttagtgcgcatcaaagaatttaaagataataaatgtgtttttatagaggactagtcctatagttttttgcggagagaggtagaataatgaacgtaaaagctgagaaatttgatgtactagtagcggacattgaaaaatctggtaatacatggtttacaaaggatgttattgaaggcgatgaatacaatacggttgtataccatggtcgtttagaaattcatggtaattctttacctgtttttatcgtgttggatgattctgtattctcctatattcgtgttgcagttacaacaacgagcattacagatgcagccattaaaaaagtattgcctaaattgaatgagcttaaccaacaatttaaagtgacaaaatactatgtaaatgatgaagacagcaatatttacactgatatttctgtgccatctacagctgaaacatttgaaccagcagtattggttaatcttatgttagaggttattaaaccgcatttagatgaagttcatccagaaattttgaaaattgtaggacaagtaaaataagaggttagtatgaatcctaaagcattagcctttgataaatttatgaaggcagaagaagtaacggcttttgagcgcaaagattttgatgatgaagatggtacagttgtatatcgatcttatattaaatcaccgctttgggatatgccgatgttcgtgatcttagataatagtatttacagtgttatccgtttagtgcttggtcctgaaaaggtaacagcgcagaatatggcggccattaatgcattgattaatcgtgagaatgcaatgtataaaaactataaattctatattgatgaacaagattctacattgtatttagattgcgtctacatgtgtgctaatgatgagtttataccagagttgatgtatgctttaatgacgtcgattgtggattatattcctgaggccgttggcgatttaaaagctgcttttgaaatcaatgtacaataaaatatgatattccttataagatagtatatcgtgtgaatagggaatagaatacaagggacttccatacctatgtgtggaagtcttttttttatcaatgtacattcgtatataataattattattcgtatcatactgtgtaatttttaacataagcactatatagttcggaatataacgaacaattataaaaactaatataattattattcgaaaaatgattgaccgatacaaattggtctgatacaatttagatacagataaggaggcgttatcatgaagagacatatgaacctaacatccgttactattatgactatttctgctaacgctatcagtgcgtaaactcggcctttttaggtcgagtttttttattaaggaggaacaatgaaggttggcattatcatgggcagtaaatctgacctagacacgatgaaaaaagcatctgctatattagatgaattcaatattccttatgaaatggtgattgcttctgcgcatcgtacaccagaggctgttaagtcttttgtggaacgccttgaagcagaaggagcaatcgcttttatcgcaggtgcaggcgctgcagcccatctacctggagtggtggcaagttttacaaccgtacctgttatcggtattcctcttaatgcaaccgcattaaagggcattgattccctcttggcaatcgtacaaatgccgtctggtatgccagtagcaacaatggccgtagatggtgctaaaaatgcagcactatttgcagtacaaatcggtgctactttcaacaaggaactaaaagaaaaatatgttgcctatcgcaaagatatggctgacaaggttttagcagataatgctgcattacaagcagaattaaataaataattattacataggaggattactatcatggctaatatcgatttggaaaaattaacacttttatacgaaggcaaagcaaaacaagtgtatcaaacagatgacaaggaaacatatattgttcactacaaagatgatgccactgcatttaatggtgaaaaacatgatactatccttggtaaaggcgtattgaataataaaatttcctcattcttctttgaattattgaaaaaagaaggcgttccaacacatttcgttcgtcgtgaagatgaccgtaaccaaacagtattgacgttgaacattgttcctctagaagttatcgttcgtaatattgctgctggttctatggctaaacgttttggcattgaagaaggtacgcctcttaaacatccaattcttgaattctgctacaaaaatgatgaacttggcgatccatttgccaacgaatctcaaatcacagctcttggctgggctacgcaagaacaattggatagaatttccgaaattactatgaaggttaacgatatccttaaaaacttcttggctactaagaatgtaacattagtcgattttaaacttgaatttggtacacataatggagaagtattgcttggtgacgaaatttctcctgatacatgccgtttctgggatgcaacaacaggtgaaaaactcgacaaagaccgtttccgtcgcgaccttggcaatatcgaagaagcttataaagaaatgttattccgcttaacgggcgaacgtgcataacctgggggttattgatgaactacgatccaatttttgacaaatggcatgaagaatgtggcgtctttggtgtgtttgaccgcactgttgacgttgcacgatatgtatactggggattgtttgcccttcaacaccgcggtcaagaaagtgcaggtatcgctattaccgatggtaatgaagtggctctaaaaaaaggtatgggtttattgactgaggctatcaaggaattaccaacattaaaaagccatatggggactggtcatgttcggtattctacaactggctctaataacccacgtaatattcaacctctcgtaatccattatcaaggtggccaaattgcagtagcccataatggcaatttgacgaatgccctcggcatccgtcgtcaacttgaagcagatggttccatttttcaaacaactatggattcagaggttatcgtaaacttaattgctcgttctaaggctgatacgcaagaggaacgcattgctgatgcggcacgtcaaatcgaaggggccttttccttggttattacaactaacgactctctcgttggggttcgcgatcctcaaggctttagaccgctttgcttaggtaagactgaacatggttatgtgttatctagtgaaagctgtgcttttgatgctataaaggctgaatttattcgcgatattgacccaggtgagatggttattatcgatgatcgtggtgtgcgcagcacaatctatgcagaacctcaaaaaattgataaaaaactttgtgtctttgaatatatttattttgcgcgctccgatagtaaaattgatggacaatctgtatatgaaacacgactcaatatgggacgtgaactatataatgaaactaaatatgatgcagatatcgtcatgtctattcccgactctggcacgacggctgcccttggatatgctcgtgcgtcgggcatcccttttgcagaagggttgattaaaaatcgatacagtggacgtacatttatcaaacctaatcaagaagaacgggaactagctgtgcgtatgaagctaaatgctatgccagaggttgtaggcggtaaacgtattgtattaatcgatgactctatcgtgcgtggtaccacaagcggccttatcgttaagatgttaaaagaggcaggcgctaaggaaatctatatgtgtgttagctcgccggctatcgaatattcttgtcactatggtattgatacgtcggttcgtaaagaattgattgcggccacacatacaattgaagaaattagagattatattaaggcagataaattgcattatctatcaaaagaaggcttgtgccgagctgttagcggcgtaccagaagcggatttatgtttcgcttgtttcaatggcgattacagggtagatgtgcctacagaacaagaggaaggggtcaaatatgtgctcgaataaaataggattaacctatcgtgatgcaggtgtagatatcgatgccggtaataaagccgtagagttgatgaaagaatccgtaaaaagaacatacacagcaggtgttgtaggtgatttaggtggctttggtggcctatactccttagcaggtcattccatggaagaaccaatgctcgtatctggcacagacggtgttggcacaaaattgcgcctcgctatcatgatggataaacatgatacgattggacaagactgtgttgccatgagtgtaaatgatattcttgtgcaaggggcaacgcctctgttcttcttagactatgtagcggttggtaaacttgatcccgtacaagtagctgatatcgtacaaggcgtcgctaatgcttgtgaagaatcaggttgtgctctccttggtggggaaacagctgagatggctggtttctatggtgaaggtgactatgatgtggcaggttttgccgtaggtattgtagatcgtcctaaactgattacaggtgaacatattaaatctggtgatgtcattcttggtttgccatcctccggtgttcattccaatgggttctccttggttcgtaaaatcgttttcgaccataagggtttctctatagagcaagacattccagaatttggtaaaacccttggcgaagaactattaactccaacacgcttgtatcctaaagctgtattaccgttgattaaagaaaattacattaaaggcatggttcatatcacgggcggtggtttctatgaaaatattccgcgcgttctacctgatggtgtaactgctgagatagattgtgatacatggccacgccttcctgtatttacaaaattgcaagaatggggcaatgtagattggcatgaaatgtaccgcacgtttaacatggggattggtatgattctcgttgtcgatgctaatgatgtggatgcggtgaaagctaatcttgaaagccgtaatgaagcggtatatgaaattggtcgcatcgttgcaggcgaaggtcctgttgtcgtaaaaggggcggtatttaatgactaattccgtatctaaaaagcgtcttgctctatttgccagtggtagaggctcaaatggcgaagccttgtacaaggcgatgcaagaggggcttatcaatggagagtttgtcgttattattacagaccatgcagatgcaggtattgtagaacgctctaaaggatggggcattccacttattgctattgaacgtagtcaatttgattcaaagcaagcctttgaacaagctcaattggatgctcttgagccgtattgtgttgatggtattgtgttggcaggttacatgcgtattgtagggaccggccttattgctcgctatgagcataagattttaaatattcatcctgctctattgccatcctttccagggcttcatggtcatcaacaggctatcgatgcgggtgtaaaagtaacaggttgtaccgttcactttgtagatgccggtatggatacaggacctatcattatgcaaaatacggttcctgtatatccagatgatacagaggataccttatccgaacgattattacccgtagaacatgcaacatatcgtgaagcacttcgcttgttctgtgaagatgcattacgtatagaaggacgcattgtacattatatttaggaggaacgatgattcaaaacgcattacttagtgtttctgataaaacaggtattgtcgactttgccaaaggtcttgtagagttaggggtgaccatctattctacaggtggcacgttgaaagctatttctgatgtaggcgttcctgcaaaggctgtagaatctcttaccggttttcctgaaatgatggatggtcgtgtaaagacgttacatccaaaggtacatggtggcatcttagcgattcgtgataatgcagagcatcaagccgctatggaagaacatagtattttgccaatcgatttagtggtcgtaaatttatatcctttccgcgaaacgattgcaaaaccaaatgttgcattagaagatgctattgaaaacatcgatattgggggaccaactatggtgcgctctgcggctaaaaataatgcatatgtaggcattgtggttaaccctgatcactatgatgaaattttagaaatgcttagaacaaatggtgcattgacgcaagactatcgttttgcactcgctaaagaagcctttgctcatacagccgcttatgatacggcaattgctaattatatgagtggtgtaattggagaaggccctacacctcctgaatatttaagtgcctatgaaaaggtaatggatcttcgttatggagaaaatccgcatcaaaaggcagctttttataaagaaattggcaaggctcacggcatgggggcattaaaacaactacacggtaaggaattatcttataacaatatcgtcgatatggaagctgcgtggaatatggtgtgggaatttacggatcctgcggcatgtattattaaacatactaatccatgcggtgccgcaacggcatccacattgcacgatgcgtatgtcaatgcctatgaagccgattctgtatctgcttttggtggcatcgtagcattaaatcgcgaagttgatgcggccactgccgaagaaatgagcaagattttcttagaagttatcatggcgccagctttcacaaaggaagctctagatattttggaagcgaagaaaaatattcgtctcatcgagttatctaagcctgaatctggccaagtaactgtgaaaaaggtgtctggcggtatgctcgtacaaacggaagatgacatcgtagaagaccgtgctaattataaggttgttacaaaggcgcaacctacggaagaacaatggaaagctcttgaatttgcatggaagcttgtaaagcatgtaaagtccaatgctatcttaatttctaacgagaaacgaacactaggtgttggtgccggtcaaatgaatcgcgttggatcggctaaaattgcccttgaacaagctggagaggctgcaaaaggggctgttcttgcatctgatgcgttcttcccatttggcgataccgtagaaacagcggctaaacatggtatagctgctattatccaaccaggtggttctatccgtgatgaagaatccattaaggctgctgatgaagcaggtattgcgatggtatttacaggcattcgtcattttaaacattagaggtaactatgaaggtttgcgtaatcggtaatggcggccgcgaacacgctatagcgtggcgtttatccatcagtccgagtgtagaaaaggtgtatgccgttcctggcagtgcagctatgaaaaattgtgctgaactagtaggcattgattggtctcatacggatcatcttatccgttttttgaaagataataaggtggaccttgttgttgtaggtcctgaagcgcctcttgtggcaggtcttgcagatgcgttgcatgaagcaggaatccctgtgtttgggccttccaaggcggctgctcaattggaaggttctaaggtctttgctaaagatcttatgaaaaaatataatatccctacagctgcttacggtgtattctccaatgtagatgaagcaaaacaattcatcgccaaaacaggggcccctattgtggtgaaagcagatggcctagcagctggcaagggtgttgtagtggcaatgactgttgaagaagctaatgcagcagttgatgacatgctaagcggaaatcgctttggcgaggctggtagtaccgttgttattgaggaattcatggcaggtgaagaagcgagccttcttgcctttgtagatggtaagaccgtagttcctatgattgcgtctcaagatcataaacgtatctttgatggtgataagggtcctaatacaggcggtatgggaacctatgcaccagcacctgtgctaactgatgtattgcgcgatgaagccatgaagaccattttagagcctatggtagcagccatggcaaaggaaggtatgccatatgtgggctgtctttatgcaggccttatgattaccaatgaaggtccgaaggtggtagaatttaatgcacgctttggcgatccagagacacaagtggtattaccattgttggaaggtgatttgggccaaattatgatggcctgtgctacaggtacattacaacctaatatggtgaaatggaaagactcttctgctgcctgtgtcattctcgcttcgaaaggctatcccgaaacctcgtctaaaggcgatgtcatcttaggtgaacttgtacagtatgatacatccatcatttttcattctggtacgaagttagaaggtgaccattatgtcacgaatggtggtcgtgttcttggcgttgtgggactgggtaaggatttgcgaaccgctttagatcgtgcttatgagcgcgttgaccatattacatttaagggcatgcaatatcgtaaggatattggtgcaaaagctttcaaataatacataatcccctatactatgtgcgtatgcatacggtgtaggggatttttattgcctataatttagtatgtacccgtgatataataatatcgatatacatagaaacaccaatgtagatgatatttggtgatgtaatagagtctgttttctttgcaatagcgatataccattatgatttataataaagaaccgttacaactgaatagtcctgtagccttttggcttaatttccccaatgaggaacgtgttttttgggtggatcggcaaagtaatcgtattgttgtaggcgctaaacgtctagccacagttaaagatgatgaggaccgccataattatgcgtatgtattttatggggatactttttttgacacatcaaaggatcctaagtggtcgggaatggggcatgaaatgattgcgttcacccattactacatcgtagaaaatggagaagccttttatttgcatgctggtgaaagtgttagcatcgaagatatagaagtgcctcatattcgtcatgatttccgtgaaactagtgatgataaaggcgattgggaccgcttgatgaatgccatttcagatggcatcggccgtggagagatgacaaaggtagtcgcatcccgtgaggtgcaattcacaagtgatacaccgtttaatgtggcgagtatcttgaccaatttggttgaaaataatccgaactgtttcatctttggttatgagaaggatgggcgcacctttgtgggggcctctcctgaaattttggtgcgtcatcgtggtagcgaaatccttagttatgcactggctggaaccgcgccaaaggatggccctaatgcgtggactaaggaacagttgctaagtgataagaaaaatctctttgaacataatatcgtccgtgaccgtatcgtgaacacgatgaagcaaatcactccagacgttacggtgggggaaactggcattatggagctagctcatctctatcatttacgtactattattactgcaaaagatagcacaaaatctctcgtagaatgggcaaaattactacatccaacaccggctcttggtggtgaaccacgagagaaggcgatggctctcttagaaacatacgaagctcatgagcgcggtatgtacgctgcaccatttggttttatgaaggatatgggggatggcattgttgtcgttgccattcgttctgccttgattatggataatattctctatgcctatgcaggatgtggtgtggttgccgattctgatgcggatgaagaatatatagagactaataataaaatgcgtactattctagatgcattgtaaatggtaaagatctagtgcgaaaaaatatgatgaggaatatatcctcatctatattacggagaaattacatgaatgaatatatcgccgccttggtggatgaattcgcccaattaggcatcacatatgccgtgtttagccctggttcgcgctctacaacgatggccatgctatttatggaacacggtgcttttgaaacctatatgaatattgacgaaaggtccgcaggatttatggccttaggcatcgcaaaggcccatagaaagcctgtaattctcgtgtgcacgtcgggctcagcgatagcacattatatgccggctgtactagaagcacaatatagcggtgtacccttgattattttatccgcagataggcctcacacattgcaacatgtaggggctccacaaacggtagatcaacaaaaaatatttggtacagctgttaattattacgaggaattggcagtaccacaacaggagcattactatacatatccgcgcctagtagctcgtaaggcttatatgaagtctatggatgtgaaaaggggaccggtgcatattaatgtaccgctctttgagccattggtaccggagttagataggagacattttgaatgtggcaggcaaccattttctgttgttccggctgctattcagccaggtgatgtatgcactatctatgacctccttgcgaataaaaaagtgcttatcttagcggggccaagtacgaatcttgaggataccgatgccattcttggtctatctaatatattccatgcgccaatattaggtgatccattgtccaatatgcgtcgtgtttatgatgaacgagtcattacctcttatgatgcattgctttcacaagaggtgtatcgagatacattgcgaccagattgcatgttacaaattggtcagatggtcgtatctaaacgcgttcagcagtgggtggcatctatgcaacatatcccaatcatatctgttagccctacaatggactatacaaaccctgcaggaaacacgaccctctttgtacaatcgacaccacaaggtttggttgatgcactgaatatggagatttctgagcttcatgtaatggcaaatgaggtccatgcagaagttgctgatgaggaactcaatacagctgataatggctatttggctacgtggattgatgcagacggtgtaggccgtaaacaactcgatacagtagctagggaacaagagctatttgaaggatatacgattcatctattacaagaattgttgccgaagaatagccaacttgtggttgccaatagtatgagtattcgagatatggattatttctggtctggtaatcgtcacagtgctattatttatggtaaccgtggcgttaacggtattgatggtacagtttctacagcccttggcatcgctacaaatggcatgcctaccgtattgcttacgggggacttaaccttctttcacgatttgaatggcctcgccgtggcgaaaacgcacccattaaatgtaaccatcattgttcacaataatgatgggggtggcatttttgaatatttgccgcaaaagggaacgccgcattttgattacttatttagtaccgcacaaggcttaaactatagtggccttgcgaccctatatggtatcgactttgtacgtgtgtcgagcaatgatgaattgaaaaatgcgttacaaaactatgtaggaacagcaggtgttcacgtcattgaaatccccacatctaaagaacgaagtcgggaattacatgcgctatatacgacgattcctaaaaacaaggaggaccgactatgagccaatatgcttgcagtattatagataactccctattcaatccagcacttcgcatgtatgtcgatcttggtgagtatcgatatgggatgacgctagctggcgccggtaaacctcttgtgtgtttacatggtttttctgagtctggttatacctgggatggcatcgttgtgccaggctatcaacttatccgtatcgatacgattggacatggagattcggatattccagaggatgagactgccttttctattcctactatgctcaacgatttgcatacggtgatttctgccgtggctggtgaaagctattctctcatgggatactccatgggggcacgattagctttactatatgctcttgagtatagttctgaaattgaaaacctcatcttagaaagtggttctgttggcattgaatcagaggtagagcgacaagcgcgtaaagctgctgatgaacaattagcactagctatagaagataatgatggagagtggtttgctactaaatgggctaacatttctatttttgaaagtcaacatcagctttcaccagttgtacaagataagttgtttcaacgtcggtctcataatagtccttatgcattagcggctacattgcgtggctcggggcaaggtgtaatgccctatgtgggtcatcggttacaagaattatccatgccatctttatatattagtggcgcactagatacaaaatatactacaataggagaagaactgtttagtaatgtaccaaactgtgaacatgtcatcgtcaatggggcgggacataatgtacatttagaaaagccaggcccatttatgacggccttagcagattttttatataaggaaaggtaatatccatgagcaaatttgattggaaagtattggatcgtaattatgaagatgtaatttacgaaacctataatggtattgcaaaaatcacgattaatcgcccagaagtgcgaaacgcatttcgccctaaaaccgtaattgagcttattgatgcattcacaattgctcgcgacgatgcagaaatcggcgttattatcttgactggtgctaaccacggccaaggtgaagataaagaggcattctgctctggcggtgaccaacgtgtgcgcggcaatggtggttatgtaggcgatgacaatattcctcgtcttaacgtacttgacttgcaacatttaatccgcatcattccaaaacctgttatcgctatggtaaatggttttgccatcggtggtggacatgtattgcacatcgtatgcgaccttaccatcgcttctgaaaatgcaaaattcggtcaaacaggtcctcgcgtaggttcctttgatgctggttatggtgctggctatttagcacgtatgattggtcacaaacgcgctcgtgaagtatggttcctttgccgtcaatacacggctgcgcaagcttatgaaatgggcatggttaactgcgtggtaccattcgacaaattggaagaagaaacagttcaatggtgtaatgaaattttggcattgtccccaatggcattgcgcatgttaaaagcatccttcaacgcagatactgatggccttgcaggtttacaacaatttgcaggcgatgcaacattgatgtactatacaacagatgaagctaaagaaggccgtgatgcgttcaaagaaaaacgcaaaccagacttcaaacaattccctaaattcccttaatcggaatatggttatcagtccttatgtatggacctgaaccctttacataataagcagtgcgcctctatatgaggcgcctttcttatacgtatatgttttatagtattatggctagctaagaggtgagatgatggaatggttacggtatggaaaacagtactatccgaatcgtatatgtatgaataattacacctatcaggatatatatagtgctgttgtgaacgtggcaacgcgattacaaacactgtcagatacacgtatcgctatagtgtcggataactctgtaacaatggccgtttatctcttggcagccatgctagtccgcaaagaggtactcttattaaatgttcatcttacagcgggcgaaatagaaaatcagttatgccagctgcatattacaactgtgttacacagtgctaagcgatgtggccaagtacctaaatcggtaacgtctatggagttcgaatctatggagtctatgttgcataatgaggaaaaggatatctttgattggattgttaatgataatgatatagcagctatcatgaataccagtgctacaacggggcagtttaaatcagtgccacttcgttggagtcaaattaaggcgcatgtacaagcatcacaagaggtgctaggtaggtctgaacaggacaattggctcatggtattgcccttatttcatgtgagtggcttatctattttgatgcgatcactctacaatggaaccgcaatgacaatcatggaatcctatgatgaagaacaagtgttgcaatgtattcatgatggtcgcatcaatatgatgtctttagtacctaccatcttaaaaaatttggaacctcgcattatacatcatcaattgcgtgtcatcttattgggcggtgagtttataccaagacctctagttgatgcatgtgtggagaaacaacttccgatttataaaacatatggcatgacagaaacctttagtcaaagcgtgaccatgcctgtattatcaaatctaaataaactcgattcggtgggtaaacccttgccgaggatgaccgtacatatcgtaaatcctgatgtcgatggggtcggggaaatccatttgaatgggcccatggttatgagtggttatatcaatcgcgagccgattcatggcgattttaataccgatgatatgggttatgtcgatgaagatgggtttttatacatcttaaatcgccgtacagatttgattatttctggaggcgagaatatctatccgaaggaaattgaagatactgtgtatgctatgcaaggtgtgaaggaatgtgtggttattcctgtagccgatacgaaatgggggcaggtgcccgcactatttgttgcttttgatgatatagatgcattaggtaccgatttgaaaatgatcgtgcgagactatatttctagtaagctagctaaatacaaggtgcctaaatacattacaattatggatgcattgccacgtaatgggacaggtaagattatgcgtaagtcgttggcctcccatctcgatatgactgcgttaaatggaggttcttatgaatgatgtattgaactttaaatccataacgacgtatcgtgtggctttgccgttaaagtttgaatttaaaacggctaagggtactgttcgtgttcgtgaaagtatcatcgttcgtatcgaagatcaacaaggctatgttggatacggggaatgtgtcgctttcacagaccctttttatacggcggaaactgttgattccgcatggaaacaattggtagatacctatattctagagttgcgcttgatgcggccaaaaccattaatggcctatattcggcagttacaattttggttaaagcgcgataatatgcccatgacgatagcaggccttgaaaatgctttaattaatctagattgcaaccgaaaaggcgtgaattctgtgtcgtatatcatggggcagtctttagaatcaactatttccaatggcatcgtcattggtgacgtgtccatggatgaactattaggtatcgtggaacagcatgtagccaatggttgtaaacgaattaaactcaaggtatcgcctcgtgatggttatgaacggacccgacttgtgcgtgatgcttatccagaattagccttagctgttgatgctaatcaaagttatacctatgaccagctggatatgatggctgcttataatgatttgaatttactatgcatagaggaaccctttagcatgacgaatttgactacctataaagcgtggaaggaatcgttgcctaattggcctattacgacctctatttgtttagatgagtcgattttatcctatgatgacttatcttatgcaatcgagtatagattaatcgatgtactcaatgtgaaagtaggtcgtcttgggggcttaatacagacgcgagccgctattttacgatgccgcgaagcaggtattccctactggattggtagtatggttgaatcaggaatctcaaagatattacatgttcaacttgctgccttaggtgatacctatatggcaggggatttatctgattctagtcgctattttgaacatgaccttatcaatccagcaattttatttaccgatgggtccatgcaggtgcctaatggtgctggtcttggcgttgatgtattggataatcgtattgaagaatatacagtggagaaacgaacactatgacaatgatagacgcattacaaattgattgtgtagagctaactggacctaccagtgggcaaggggtgatgcatttaactagttatcatgcgcagccacaaggctatctcaatggcggagctaccttggcctttggtgaaattttatcagggatgctcagcaatcaactgattcgagatgatcaatttgctgtaggtcaatcggtaaccgcaaatcacatgcgacctatgaaagcagaaggcgatttgattgctaaaggacagctactcttacaagggaaaacatctcatgtgtggcgctttgatatgtatgatgaaagccatcgcttgatatctcaggttaccgtaacctgtgcgatagtacctaaaaatcgataagaaaaaaagacctctttttgtaagctgatacggaaaagaggtagatgatagcaaaattcgactttggccctgcgaagcccgaagggcgtagacagacccggccggtggagagttttgctatcatctacctctacaaacgtatttgctacgaaagaggtctttattttcttgtgattttatagagtgcttcgatatctggaatatcatagatagcccaagttccgtcaccgatgtgcttcataagtactcggatgggagctgtttggtttgtttttgtattgtgaatcgttacggttactgtggcggtatcgccatcatcttcagaggtaatgttcttgatttccaaatggcgttgtttaaataattcacctcgttggatgcggtctaccatagaaaatgtattggatgtatcttcgctttcaacatctgaatcactactattttgtgatttgaaactatctggatcctctacatatttacgaattacatcatcaagaagggctggtccaaatgtttttgttgctgccacagcggccttgcctaatggtgaggatgtatccacataggtgttgccttcgcgggtaacgatatttttaaccaatgatgttgtatcgatgtgctccaataccgtatccgcatctttgttttcaacggcttcacggatagtttggaacgtatagactggtgtatgaggaatataccataagaaataccacatagcgctcagtgcagctatgatggcaataatgattgctattgttaatgtttttgatttcataatgttgctccgatgtatataatacatatattttaacacataaatttctccttctctatagttgtcagcgctttagattataggtataataaagtgtattcattttatattcatcattaaaatgaatgtgtaagagaggagttagaaatgaaagacaaattaatactaaaagctctggtttgcagtgcttttatgtgcagtctaagtgtgggaacgatggctgcagatgtgagtactgacgtaaaagctggggatactgaacaaagtagctggatggatcgtactgatgttggtattggggttcaaggtagtcagagtgatacatatcatgatgcaaaaataaatccagtaccgtataccagaaactctaattcatattatcgtagcactcatagtgctaaaaataaggttaaacctgtacaatattttatagaaacgatacaacctattaagtattacggaaaaaatgactcatccgttttatttgtgcaaggtcgtttagatgcaaatggcggcgaaaagatttctactcatgcttattggaatggtggtgggggatcagaacatgacaatcaggcaaatagccagaatgactatgttgataaaggtgaaacagttcagcatgattctcttggcctattaggaagtattggcgttgggtatcgtcgacttagtaagcatgaacatgcctatataggtgcgaatacatttttggattatgcatttaaaaacaaattatctcgtgccagtattggtttagaatacgttgctggcttgaataaaatcagtaccaatgtatattatggattgtctacaaaaaagacagagccatattattttaatgattcgcttataatagttccgagacaagatgaatttcatgatccaaatgatgggcatccaactggttttaccaagatacgatatgcttatgagcatgtactagatggctataacctccgatatacacgtgactttaagaatgcgcgatgggtttctacatatgtagatgtatatcattggaaaacgaagatccctagcgaacatccaactagtatgtattatattaatcaacataagtggcaatctataaatggtttgaagttcggggctatattaaatgttacgcctcatatttctttagattttggttttaataaaaataatattagttctggtgacccttatgtatctattatgtatacattaggtcagtctaagtatgcgtactttggtggtaaacatagcgaagacacattgactacagcacgttccgagatgctcgataaagtaaaacgtcatgaaatggctgttgaatactattgggagcaaaattatcgagatacaccgtgggatgttttataaatagtataatagttatgtagtctctataataaacaattccatataattatattttaattggcgcttagttttcttaaagaatactaggtgccaattttatttctataaattttggtttaatctggagtatattcaagtatactgaatataaatgattaatatatacgatttttgatgtataattcatatttctatatattttggaaaaattcatttaaaaattagaaaaaagtacttgcattatatgagtggctcatgttaatatatacgagtagtcaacgagagttgatacgcggccccgtggtgtagcggttaacatgtcgccctgtcacggcgaagatcgtcagttcaaatctgatcggggtcgccatttttttttacaaaaaacatgcctcggtagctcagtcggtagagcaacggactgaaaatccgtgtgtcgacagttcgattctgtcctgaggcaccatttttgtattccacgcggttgtggtggaatggcagacacgccatcttgagggggtggtgagcgtacgctcgtgagggttcaagtccctccaaccgcaccaagctgattaaataagggcttacaggtaattctgtaagcccttatttttgtttgacatcataatatcttgcgtggtttgacatcattttgacatcagaatattttagagatgcgttctacgatgtcatcttccattttaggtgtcacatgtgagtatgtatccatcgtttcttggaatgaagcatgccctagacgttcttgtatggctttcatattggccccattttcaatgagtagggtggcgtgggtatgtctagtaccatgcatagtaaaagatggcttaccgattaaattggcgtattttttacatagcttgctgacttcatcaggacaacgaggaccgccttttataccaggaaatacaagattattattaatccagttcatggttttaattctacgcttgtctatgaccgttttatgcttcataagctcctcgagcgtttccgtatcaatggcaattatccgttttgaagatgttgtcttagttgtattggatataactgccgtagatccgattttgagggcagtttgtgaaatagatatagttgatttcttgaaatcaatatccgaccatcttaagcctaataattcagaccgccgcatacctgttgcaaatgctaatttaaagagtgcatgatgttctacattagagatattggataggaaggccttaacctcatctgcagataacgttaccatatttcgaaccttaacctgctttggtcggtctatgtttttcatatagtttttagggataatgtcatcttttaccgcctgctccaatatggatcctagaattgtcatggtgtaggatatagtccttgatgacaatccatccattgattcaaatacataccgtaatgtattaggtttaatttcggctaactttacgccaccaattttatctctaatataacgattgataataccagtataactttgatatgtagcaggcgttatagtctttgcttttagttgtaaccatatattaatccaggtgtttaatgaaatagtatcgtcgaaattagcacatgcttgatttgtatttacatatttctccatggcttctatggcagcctttttagtagtaccataaaagtatttacgcttaccgtttatcatcttcgatacttggtagcgcccatcggctcgtttcttagccataaaaaataacctccttggctaaaaatggtatagtaaataagccttagatgtatgttataataaaaatatgcggtgtctctaaggcatcaagcctatatctagtagtagctagatataggccttttttattttgtctaatgtttttatgtatattggactattaaataaaatagtccaatataatgtgatatattggactataaaaatatatagtctaaaaaagattaaaatattagacttaactatctataatacttaataattttggacaaataaatgttctatttttagctttatctgaactaatcaaaatattctgctctaccattttgttcaaaagtgtaaatacagtttgtttactagcgttaatttcttcgataagttgtttacttgtaaatataggatgctggaaaataaagtctaaaattgggatgaagtaatatgactttatagaatcgcctaaagatttaaattgctcatataaagataaaatatttaaagcttttttagtattgttatgagattcagtgattatgccacttagaaagaaataaatccaagatacccaattattatttttagaaatattggctaaattatgaatgtattcatcacgatttcgttcgaagtaagagctcatatagaatatgggggatggaataattccacgataataaaagaataaaggaattagtaatctgcctatacgtccattcccatcttcaaatggatgaatcatttcaaattgtgcatgaataatagctgcttgaattaatggatttatctcatcatagtgtaaatacgtttctagattagacatataagagtcagttaattgaggggaaacaggggtataagaaataaaatcatagccaccaatataattctgtaactttttaaaatcccctggatgtttagtagaaccacgaacattatctaggagaatagcatgcatttctttaataatttttattgttaagggttctttactatcaggatttgacaattgattatatggtgaaattgtatctaaggcatgttttaatgcagaacgataattgaggatttcttttaactcatcatcctgaatatcagtttggttgccagcttcatgattaagaatatcttcaagagttgcgtgtgtaccttctaatttagaagataatacagcctcttgtgtagtaataggtgataaaagcaaaacaggattaggtgtattcactaaaaagcctttatattcacctagagccatatttgcttctgaagataatttaattaactcaggagtgagtaaattaaaagtatcaaaaggtaaacgttgaggttcgtgtggtggaggtgcagatctacgtaattctgcaagcctttcatcagtaatattagacataaaagttatctcctaaaaataagcaaccataagtaaacagtaaatattataaaacattttagttagctgaatatgttttgataatatattgcccacaattacaacgataaatagatttatctgtagtatcatccatatggatatgtagctgttcttttaacttaggcaatggattatgacattgcctacaggttagtttatcatttttgatatacacaccactataacgaataccgtctatattgacggattgtaaattatcatcgtctaaggctgctaattctgatagagcgtatatatcatttaacatctctttgtcagtattagcttcattaatgaaattaattttaatattatccatgaaagttaattctccctgtgtcttttaattcttctaatccgtgaggaactccaacggctttggctaagttgcatagactagtgcagtcataatctataatcagttcgtctggtaataataactcaacagcgaatgcattggcttgccgttctagtttatcagtgcagtaaaatgtatgggctcgtaaaaatggaacgttcgcatcttgatgtaataacgcatgaccaagttcatgggcacatacaaacctctgcagatgataaggtacattatcattaatatggatagtccacatgcgaaaatgacaatcacagtacccaagtaacctccctaagctttcaaaagaaatcataatatcaagacatttacacaactcaaaagggtcattggtattatgtgtagtaactaactctctaacaatccccttaatatccattggcatcactccaattcagaatttttatatttgtgaggggtgaattttttttgtgctcgttttttagcggtacggatggacatttctaatgattcttttaaaagctctctagtgatatcgtccatttcctcaccgccgttataaaaggcaagggctgtatctgaatttaaatcatctaaaatagattgcaatcttttttgaatatctcgttctacacgaggagtaaaatctttttgtgtggttgcaaatcgtggatctaaatcagatttttcaagtttcaaggcatccgcgattttttgaatagtaccagcattaggcgttgagcgcatagcgaaatatccagataaagttgatgcgggtattcctgttaattgtgaaagttcaccttgtgtcatatgagatgtatatttttttagattttcagatatttctttacgaatttttctatcaaaatcactaagttgattccttgccataagcgagttctcctttctaaaccatctatattataacgaataaaatcgttaaaatcaatataaacagaaaataaaaacgataaaattcgtagttaaatttacgaaatttgttgatataacgaataaactcgtttataatagtgtcaaggaggtgatgaaatggtaatcactttagaatcagcacgtatcaatgcaggatatagtcaaaaggaagctggcgacttgtttggcgtacattatcagactatcgctaaatgggaagaggataataccaaaatgccatttgatatggtgaataagattcctgaagtatatggtattgaacataatcatattttttttggaattaaaaacgagtttattcgttctatcagaaaaaccgcagaaacctataagaaataaaaggaaattatcaaatgaacaataaaaaagagccacatgatgcggctcaaaaaaagtggattatatttagatattttaatgctttgaaatataacaaagaccaatcactggaggaaaaattagaagatataagatattgcacaagagttaatgtgggaatgtttgttattgcagtaatactaacgattctaaatattacgagaatataaaggttaatattgcaattattattgttgtaaatataccaatgccagctaaccatgcagcaaatttaccatatttagcagattcctttgaaatacgaagactttcttctgcaagttgtaatgcatgattttctttttccaactgatgcaaaaaatttaaaccagatacagttagttgaaattcatcagaatcatcaaaataataaggggcaaaaaaatcttttggtatagttacaagtttaaagtaggaatgtattagagaggtagtattagagattgcagatatacgatcaatagaataaaagggtggttcaactttctttttgggagtattggataaatacaattggagagttgcatcgttcaatattgatacttctgcttttaattcagcgtaagtttttgacttcctattaatgaataatattaatttctctaaattttcattggttagagaatgagcgtgtgaatcaaaggaatcaagttcttctttatagtttaaatactcttgttcaatagaattttgcgataactgaagattagaaataggtaatgccttcataatccctatatttttttggatggcattactaatagcttcagatttttttaataagtcgctagtgggtttcataaaagacctccttttaaacaattatagcattaaggattgaaaagtaataagaatgggaaatatagagctggaaaaacatatagggaaaatatatacgagagaagatacagaaaaattagggtatcaaaataaatacatagtagctgaatcatcagaggagggtttttggtattatttatcattcattgctgtactgatttcttctttttcattaggcgtatcagtagcagtttggatacttaaaattttgtaaaaggaggtaattatgaataagatgtgcattacggtagccgaagctgcaaagcttgccagtgtaccggaaacagttattcgtcaatgggcggaggactttgacttcccgtcaatgagaattggtaagcgtggaggcaagcgccttatccacgttgaatcgtttaatgcttggctagccaaacgatgtcaggcacgaattggtgaatagaaaggaatagataatgatgaagttaatttgggcattaagagccgtatcgttcctaatgatcatcgggacaattggttctgtagaaattaacaggattgatttctacacggcttttttacaaattatgcttggtttcgtgttgctgattttaagcaactactgggcaagggaaattcgattttattcaagaaaaaaagtccgttaatcgccttggacagcaaacggacttttggtagagtactcggaaatactctacctgtattgtacaaaatataggagataaacacaatgaataagacattattgatgacagcaacaatcgcatctttgacagtaaacgtatttgcagccgataacaatttcatcggtggcacagacaacgtagttactaacggcgctaaaagcattggcgttgtcggctatcaaaataccgtaggcggaaataatgccgtagctttcggtgagaataacgtggctaacggcaccaactctttcgctggcgggaatgactccaaagcgatggggcggaacagcttcgcttacgggtcgcatgccgaagctctcatagagtacacggtagcgattggttcacaggctagaacaacagcatatgacactattgccatcggaaatggtgcctacgcaaacggcgagtccactgtagtcattggccggactaacacggtcaatgcagaggatgccacagttattggctccaacaatggagccgtggacagcggtcacggcgttgtggttggttacaacaaccaagtgctcgacaactctaaagagcaacttatctttggttccaactctaagactaaaggccaaggcgctattgccgtaggtactcatgcacaatccggagctatcgacgctttagcgattggcaataatacattagctgacacacctaatgcagtagcattaggcacaaattctactactgatactgctgttagcacagatcatatttacatcaatggcaagaaattcgacttcgccggtggtgtagctgatagtactgtttctgttggtactacaaataaagcaggtatgagcggtgtaatgaattataaacgcactattacaaatgtagctgcagggagaattgattccacatctactgatgcggtgaatggtagccaattaaatgcagtcattaactcattgaatttcactacagtaggtgacggtaataatacaacagtatctcaaacaaccaacctaaacggtggcatggaattttccgtgaatgtaaacaaagatttacatgacatgaactctgttaactttggaacaaatgtagatactgttcgtagtgttgtaaataaagaaaaggctcatttctttaatggtgatacaaacgcagctgtaactcatgatggtttgaaattagaaaatacaaatacattagatactgcaagctacacaatgaacggcataactgccgacagtaatggtaagcatattgagttcacaactcaaaacattactgcaggtggccaacaactacacgatgtagcggacggtgtagcagatactgatgcggttaacatgcgtcaattaaaagcgcaaaaccaagtaggtatggctcaaatcaatcaaacaaatgcacgtctaaataaattaggagctagttctgcagcattaagcggtttacatccattagactttaaccgcaatgacaaagcatcttatgcggtgtcttatggacactaccgcaacgctaatgcggtagccttgggagcgttctatcgtcctaatgaacgtgtaatgattggtgctggtatgacattaggcagtgaaaatcaatacacattgaacatagcgtttaaaactggtaaaggtagtgactacattcaagaggctaaggatgcacaaagcagaattagtaaacttgaagcactcgtaaatcaattagttgaagaagtagaacttagcaaacaatcaaaatgatgaatggtgcagatttatatagttatttacaagataaacaattagaactcaataaagcattgcgtttagccaaagatagagggattgatttggcaaatgctgagtatgcttataaaaaggccaaggctaaatttatagcctcggccagattggaaaaagtagcagttacgttgatacgtgatctagcacagggggatgaatatattgctgagcttaggttaagaagagataccgctaaggtactttatttaaatgctcaagaagcaattaatgtattcaaactacagtgccgattagtagaagcacaactaaaacgggagtggcaagatggatgactggtacaaccaattaactaacatggaatgcccaatatgtggaaaaccaatacattgtgcaattgtatgtcataaagaaaagaagcgtgtatgtgatacatgttgtagtgaatgccaatacctaatgagatatcaaggagaatggcattgtgaatttaataaataaaaaaccgccgtgctataacacggcggtcattaagtagttatatgagaatataaccataaataatcctatttatagtttacctcatatatagagaaaagtctagtaaaaatgcggttttaactgcatttgtgggacttgatagatatattaacaactcgacataaggggtaaataaatgcgtaggagaacagtaatagaatcgaagaatattagagaggttacagattcaattacgggtaattcatatctagggaaaataggaaagaaatctagaagtgaaaaacaacatgtaacacctgaaatgatacgtaaaaataacatacgtattgctgaaaagaaattaagattattaatcgatatgaattttgtagaagacgattattatctaacgctgacatttcgagatgatcctgatgaaactgaagcaaaaaataggatgactaaatttattagaaggttgagagcaagatttaagaaagaaaatgagctttgtaaatatatttatattatggaacggcaaggcaaaatacactttcacatgctacttaatcaaggtattcgattaaatactaaaattctaaaacagttatgggaatatggatatacaaaattagagctgtacagaggagaagctgaagatgcaattggattagccaagtattttataaaagaacgaaaaatggatatacaaggcagtccaacacatgcatctaagaaatgggtttcaagtacgaatttagataaaccaaaggtagaacgtaaaacgattaaagctacggagtggagaaaagaaattaaagttccacaaggctattatttggataaagatagcgtatatgaaggtatcaataattatggatatccatttagaacatatagattaatacgtcttacgaaatggagtgaaatatatgcgaagagaaaatcgactgagaccctgtccattctgcgggaataaatcaatcagagtggtaacaggtattaaagttacagaaaagcatcatatggtggtatgtgataaatgttcggccattgtgtgtttcgaggaagcaacaaagtatttagattgtgaaaaatattggaataaacggatagattaggaggaaattatgaataatgtgcaattaatagggaatttagtgcgtgacgcagagttaacttttacaaaaaatggaaaaatggtagcaagatttactattgctgctagtaatgaatatgtagataagagcacaggtgaagtaaaagaacaaactgcatatgttaattgtgtagcatggaataagttaggcgaacaagcaggtaagctaatcaaaggaaatagatgtattgtaaatggaagactacaaacacgatcctatgagactaaagagggcgaaaaaagatatgttactgaagtagtagcagatttcattggtgatagcttatcgaataaagatgatgagccaagtaattttgaaacatttggtgaggatgaacaaattcccttttaaaggcagcgcagagacactgccagataaagaaataaaacataaaccaaatgtacgatgtaatgcaaagagaaaagcagaaaggttgatgcggtagtggcaagacggcaggaatataagaaagcaaaaacatgtaaacatgctattcaattaactgagtttggagggctatttgttaaaaatacatgtgttaatgaacataagcttatgttaccatgtccaaatcaaatggggatagcagttaaaagaccgtatgtgatggccaagtattgcagtggatgtaaactctatgaagacagaagaaagacagaaaaagacagaaaaagacagaagaaaggttaggtgaaatataactatgaatgatcctacaggtgtgagattaaattggttggcattatgggcttgtgtatatggtaatgtgacaattactagagccttaaaatgtatgggcatacgttcttgtaaaacgatattacaagaagatatgcaagacttaaaacacaataaattaagtcaaagtataggaaataagatatgtgaagattataaaacaggaaactatacacttagggagatggctaaaagatacaagatatcatatggttcaacttatcgtattgtaaaaggaacatataagtacgagagcgcatgatatggaatcaagagcagataagatgatgcggtatgcaaatatgtcagtaataccaaaagcgtatatagcggatatagtaacagacttagaaacgaaaaatataccacataagaaagaaatcataacactattagcccaactatgggtgataagggcaaggtaggtgataaaaatatgaaaatcacacatgtaaaagcaaaatcggctaattactgggtatatggtgtagcaattagacacgatggaaaatgcaaaatatatcaggaaaatgagatgccaatcagtgtaaaggaatatacgatttgcagagccacagatggtgtagatgatgcagatgatttgatatatgaaaacgatatcattgaatataaaatgccacattgtagcagacgatttatagctaaagtattttataacgaacaagatatgaaatggtgtgtatcagtcattacgagtgaacagaagtgttattgggatttaggctttatagttaatgaagcagaagaactaaaaattaaaggaaatatatttgattaggaggaaaaatggatagatatgaatgtgttaatcgatgtactgcagcatttttagagggggataaaccaagaaatttggattgggaaaaagtagcaagatacattgttaaaataggccataattgtgttgtatatgcgggaattgaagaagattgggataatacagctggtattatatatgacaatggtgaagttattcatgaagaggcgtataccactagtaaatggggaacaccgattatagtggtgtatatcgaaggtcaaaataaacgaattgatgcggacacaatttactataaagaagctgatgaacatataaatgattggactgctgaaagcatagctatattggagggaaaataatgaaaattaagagttttgcaacatatggcgtagggatggacattatatatgaagatattttgagtacaggtgctacagcagatctacgtataaagtcagaggatgagaaaagtcctgaattgtatgatgcgtggaaaagaatggaagctagagtattagagtatcttggaaagctatgtcgattaaatacacaatgcatgcttaatgtttctaaaatacaactaagatatgcaagagaaacggatgaattagagtcattagtattttgtgggtctttaatggcaccagaagcaggaataggttttaaaacaggtgcgataagagttaatactttatttgatgtgatggatacgaaagacatcggtatcttgagagaactagaggcaaggattcgtgggtatattagaggagaacgggcgcaagcaaaatttgattttagcttaaagaacgatgtagaagatgactatgaagaataaaaggaagtaaataaaagatgaacaatgtaccatattttttacaacacttacctatttggaaatataatttggaagatgatcagaagaataaaaacaaaagaataaaagaataaaagaacataaatatgatgcggtagataaacatacagggcagatggttgaaaaggtatgtcaaatatgtggaaagaaatataaaacagaatacagattacgtaatacagcaaagacatgtagtaagtcatgtggtcaaaaattaagaatggccaataaggtacctgaaaaatgggtagataaggcagttgaattaagacaacaagggtttaaattaagtgctatagcaataatcgttgataaatcgactagtactgtatggcaatatctgaagaaaagaggttattaaaaatgctcgaacaagataaaaatcaatattgctggtgttttgatggtgatgcgggtgatccacaaggaagtattgaagaagctattgatgactttttaaattattatggacattattgttgggatgagaagaatgatgttgaatatttagaacaagatgtacttgatgattacgtagaaataggaaatccatattattatgttccagaaatagatggtgaacgtgtaatttatgatcttcttgataatgacttacctgaagaatttgccgaatgtgattttgaatattttaaaaaggtaaagaaagaacatctatgtgaattaagcaaaggattgacagaagtattcagaaaatgggaaaaatcacataaatatggatatagcgcatatttggtgaaagaaacagaactatatagaatcggtgattatatcgattcagaggggaattataaatgaggtaaatatatgaataacgaaagcaatgatacatatacagtggtattgataccatgtaacaatagtgaaaatgtaggaacatatggcaaatataagacgatagaagaggcacaatcagcagcaaatgtatttgataacatgcaaaaagcttacaagaatggcttaacaacatcacaattattaaactttgtggaagacatgcccgttgttgtaaagaactatgaaaggattatgagtgtaagttggatattagaacatcaaattagatgaaaaggggaattaaataaatgaacgaaaatcaatttgaacgagttacagggcatgaagatgctgatttacctgaacgaaaaacagaatatgcagcaggatacgatgtgaagccttatgaaactggcactgtattaccacatcagacaaaacttattcctactggcatcaaatgcagattgaactatgatgaacatattcaactgcatttaagatcaagtgtgggaattaataacgatgtaatgctagcgaatggaacaggtattattgatgcggattactacaacaatgacgataatgaaggtcatatcatgatacctattagaaacttaggtgatacgccgtttgaatataataagaacgaaagattggcgcaattaattatcatgccatatcgtattacggctaaggataggactacaaagaaacgtacaggcggttttggaagcactggtaataaataatggcgattaaacataagagaatcattgataaaaaaatgattaaaacaattagaacaaaccattgtgaatactgtggcagactatgtaatatagaaccacatcatgtattttctcgtggtagtggtggtggagatatccgagaaaatctaattcaattatgtagtcaatgtcatgtaaatacacatgcaggaaacatgcctaacaaagaaacttgtttaaaaattatagctaaaagagaacatactgatgcggaaacgatatatgtaataaatcgtaaagcaatgggatatgacatataaaagggtgataatttataacgggaggtgatgcggatacatggacaaagaagacgaaaagaaatatataaggaaggcaattgaatatttaaagccaattaaatcctgtacattagaaatacaatcagccaaacgggaattacaaagattaaggagtgatatcacttcgctaagtgcaatagattatagtaaagatcgtgtatcaggtggtggtattaaagaggggttagaggccagtatagctaggatgttagaaagtgaatctaaatgccttgagaaaacaaatgcactgattcagttacgagaggaggcaagaaaacatattgagtgcttacaatgcgttgaaggaaagatagcattgatgcaagaatatgttaatggtatgtcttttaaaggtgtggtatcatttatagggtatagtaaaacacaggtacagtcatataaaaaagaagcattaattgaattaggtcaagaattgacccaaatagtaccaaactgacccaaatagtaccaaactggtatttagatatgtgatattatatatgtgtgaaaattgccactgagcaatcattcaccaaatcactcaaaacaaaatattaggctcgtgtaaccattcagttatacgggccttttgttttgtacatatgatatacccccaccccccctggtgcctattgaatacacacaactcaccaatcaatgattcatgtttgacctatttgaatatataactacacaaccttaagatacacttataccttgtgagttgtgtgtattgagtagacaatgaaaggatgtgaacggtatgcctaatgtgatatgtcataagactgcatgcttagataatcatcatggaatgtgtggtgctaacaaaatagtaataaaagctaatggttactgccgttcatgttcgcatgcacaacatatgatgagacatgtggatagggatgaggcacggcaccgccatgaagatgagcgccgtctgtctcatcgtaaaaataaaaaataaatttaaattattacacgttttgttgaatttttgagtgaaattttttgtgggtccttctggccgaagttgaaagcgtgcggtggccgagaccccaaaatttgcctagattttaatttttttatgaccttgctagtgatacaggtaatgaaaggaggctgattgataagtgaaaattacagatgatttgaaaacagcaacggcctcgcagtcgaacctggcaaaagcacttggactctcgcgtcaacgtgtttcgcaactgctccaagaaggagttttagcgacggatgataagaatcagattttggttatcaaatccgttatcaattatgtcaaatataaggggcaatcttctgtcgaagaggtaagcagttccgatgatgcggtatttgaggttgaaaaggccaagaatgaacgcgcgaaacgcaagattgctgagttgaagttggccaaaatgaacggcgaagtgtactcggcagatactgtagaacaggttatgacagaaatgctcgtgaatttgcgcacacaattgttaggattgccaactaaattggcgccacaattgcagagtgtgacaaaagaggaagcatacaacctgttaacgcaagaaattgaggataaattatccgaattaagtgaatatacgccgtcattattcatggatagtgatgaattagatgatgataacgcgccaaattaggcgcttttttaatgcaaaaaaggaggtgatagcatgaaaacggcaaaagaattgtggcaatatgtctctaaaatggggctgaaaccactacctaaaaccagtgttagccaatgggctgacgattaccgtatgctatcacaaggcctttcagcggaaccagggcgatggaaaacgagtagagcaccctatcaaaaggatattatggatgcatttacacaacctggtatcaatcgggtagtggttaagagcgcaagtcaagtgggaaaatcagatattatgaataatgtactagggcgatacgctcatcttgacccatgtgcggtcatgatgattcaaccgactatcgaattagctcaagattattcaaagtctcgtatttctccgatgatccgtgatacgaaagtactttcacaagtattttatgagactaaatcagaagacggcgccaagacacgagatggtaagaacacaatcttatctaagttattccctggtggccgtcttatcatgtgcggggcgaacagtccagccggattggcatcacgtcctgtgcgtgtgctacttgcggacgaagtagaccgcttcccagatagcgctggcacagaaggtgacccagtagatcttgctgctaaacgtatgacaaccttctggaatagggtcatggggttattctctacaccaacaaatgaaggtagctcacgaatcgatgtagagtatcaaacaggaacacaagaagagtggcaacatgagtgtcctaattgtggtgagtatcatttgatacgacatactgagatggaatgtgagacagaggaacataaggatgctaaaggtcggaagattgtagtagtcagtgatgtgaaatggcggtgtccagattgcggatctacattttctgaagacgaaatgcggaaagttcctcaaaagtacatatcgaaaaacccggctgcgttgcataatggcatacgcagtttttttgtaaatggatttacgtctccgtggctaacttggaatgacatcatgagggaatggctagaggctaaaggcgaccctacacgtgaaaaggtagtcatgaatacgcgtttcggtgaatcgtatgcacaacaaggtgcatttgaagactatcaacaattcattaggcgccgtgagaagtacggcgcagaccttccggacggtgtgttattactaactggtgccgtcgatacacaagacaaccggttagagtatgaaatcaccggttggggatatggcgaagaatgttgggggatttgtaagggcgttattcttggggaacctgacaataaagcaacatgggatgcacttgatgcggttcttgataaggtataccgatttaagaacggcacaggtcttaaagtggcacgtgctttcattgactctggcggtcactacacatcaaaagtctatgaatactgtgaaaagaatttcagtaagcaacgatttgccatcaaaggtacggccggaacaccggggataccgttaaattataaaattggtaaggcttcagggagcaagattccgcttgttatgctaggtgttgacgatggaaagcaacaggtaatgaaccgattggccatcgaagaacctggcgctaagtactttcatttcccgttggatgaagaattcctaggaacaagagggtacgatgagctgtatttcaagggaattatttcagagcacaaaaagaaagtaaaacgtaagggcgttatccatgaaatatgggaaccaactgcaggggttcgtaatgaacctttggacttacgcgtttataacctagcctgtatgaattctatccatcctgattgggatagattggcggaagtagtcaaaggtgggggccattccactacaacagtaactactccacgaaagaaaccaatgcggaaacgtgttcgcagagctagtaaagcagcagatatttaggaggatgtatggcaacaagttattcaagtaagccaaggctcattgatgtacggttagagtggtatgtcaaagctgaggaagcaatattgactggccaaagctatacaatcggaaatcggactcttacaagggcaaatttagctgaagtaaggaaaatgattgatgatttagtagcaagaggcgccaaattacctggtatggacaccgataatgggcgtggaaaccggtcaaaacgggtagtttttagagattaggagggcaaaatggcgagaaaaaacaagaaatttagcgctaaaataggcactccgaaagctaaaaatagcggatatagtgagggtggagcctcttataataacaagtcattgaaaggatataaccctagaaaactgggttataaggctgatattggtgcaaatctatcaactttgcgtgatagatccgcagatttagccatcaatacaccagtcggcacggctgcaatcaatacgagtaccactcatacagttggtgcaggcctaaatgtgttccctagacctaaatttcaaatcttgggaatcagtgcagaggaggctaggacatgggctcgtaatgttcgcgctgagtttgacttatgggcggaatcaaaagactgtgatatctaccgcaagaacaatttatatgacatgcaaagcattgcatatcaaggatatcttacagatggtgatagtttcgccgtgtttaggcgcaagccaacaacaccagatatgccgtatacgttgcgccttcagttgattgaaggtaatcgagtaagtaatccgcttactgattctacatatgttacaggtgacccaactggtgttgaagcgcttaacccagataatgggaaccgcatattgaatggtgtagaaattgatgctgatggcgctattgtagcgtactgggtatccaatcaagtgccaggtgaaccaattacaagtatgttaacaacatgggcaagggtagaagcatatggcaagcgtacaagtattcctaatgtacttcaaattagtaatgatactagacctgagcaatatagaggggtgccatatttagctccagttattgaaacgctaaagcaagtgtatcgatatacgaatgcagagcttacatcggccattattaagtcatactttgctttattttttacagaagcagttacaaattcaggttcattaaatgatatgttggccgacaatggtgttgatgatccgacagaaccagtagttgatgtatcagaatacaatttaggacctggtacattaaacgccttaccgaaaggcgtggatgtaaagagtgtggatgcttccaacgctcaatctacttttgaagtatttagtacgcaactcatcaaacaagtaggtgctgcactcaatcagccttacgaagtacttatgaagaatttcaactcctcgtattctgcaagccgtgcagcaatgttacaagcttgggaagaatataaactacggcggaagtggttcgctcgtgacttctgtcaaccaatctatgaggtatggctaatggaggctgtagcgaatggacgaattgaagcgcctggtttctttgatgatccattgattcgaaaagcatggtgcaatgctgattggttcggaccaactatgtcaatccttgaccctgttaaggatatgaatggtagtacacttcgcgttcagaatggtgtttccactcgtgaacgtgaagcggccgaaatgacagggacagaccttgaagagaacattgctcaacttgcttttgaaaagcaactcatggagaaatatggcatggggctagctgatgcggttaatccttccgttggctctaaatctgaagcgaaaggaggtgaagaggatgaataaattttggtctgttaagaattttgtaaatcaagatggtaccggtcaatctgaattgattttgtatggtgatatttctgatacctcttggtggggtgatgaaattacaccacgtgaatttgcaagtgacttggctagttgtaatggcaatgacctaacaatgcgcatcaactctggcggtggtgacgtattcgcagcacaagccattcacaatatgattaagacttacacaggcaacgtaacagcacatattgatggcttgtgcgcaagcgcagctacgattattgcatgtgctgccgataaggtaatcatgccaagtaatgcattgtacatgattcataatccatccgtatatctaggcgatagctttgatgcggacggattaacaaaaatggcaaactatttggcgagtgttaaacagacaatcgcaaacgtttatttgagccgtagcgatgttttgacacctgaacaggtaaatacacttatggatgatgaaacgtggctcacagcggacgaggcgaagtcctacggcctaattgatgaagtagatacggcgattacagataaagctgttatgaataacggaatggttatcgtaaataaagtatcttgcaaatactcggccaaaaatgaagcaaaaatcaaacaatttttaaaaagtaaggagaaacctatgactgaaaaccaattcatggcaagcttaaaaggtttgctaggtatttctacaaatgaacctgcagaaaacgcagcagtaacagcagaacgcaaacgcgttgaagcattaaatgcgttaaaaggtgacaatgaagtcatcaatcgtttagttgatgtggctgttacagaaggtaaaactgtagatgaagtaacacctttcatctctgccgtgtctgatatccctgcaactgataacaaagtagtcgaccaaattcgacaattagttattgaccaaatggaatccggtgcggataaagtggcacctcaaggtgcatctacaccagaaaccaacaatgcagtagcaaaagctagtgcaattgatgaagtcgtagcatttgcaaatgctaagaaaggcggtaaataatggcatatttcgaacaagtaaatggtgtcgcagctgattacctattaggtggtggcggtgtaccggtattaactcaaaatgtaaaagtagcagctggcgattataaacgtggccaagttcttgaaaacaatgctggtacatttcaaaaaattacaacaactggtaaaccagctggcatcgtagtatctgatactactgcaactactgaccataatgtattgactgtatacatttccggtcgctttaatcgtgaagtattggtagttgaccaagcttataaaattaatgatcatgaagcggacttcaaggacgctcacttattcttaactagcattaaatagggggaactatataatggcaattgatttcaaagatacattttccttgatgcaagctgtggaacgaatgaaagctccagcaagtttcttgcttgatactttcttcccacaagttccagcagttgcaacttctaaaaaaatcacagtagaaactcgtaaacgtggtcgtacattagcacctttcgtatctcgtggtgcatctggcgttaatgttaaacgtgccggctctaaaattgctttatatgaagcgcctatgatgggacctagtacagttattgacccagatcaacttgaccaacgtgcatttgcagaaaatattgtgtctacaatgacacctgcgcaacgttcttctcaaatgcaagccgaagatttgtcctacttgcaaggcacaatcattaatcgtaaaaacaaaatggcggcagagctacttactacaggtaagtgcaaaattgaaggttatgcggatgatggtacaactgttttaactgatgaaattgatttcgaatttgaacaagatattacaccaactactgcatgggaccaagctggtgctgatatttataacgatttgaaattggcatctgaaaaaattcaagaaaacgcaggtatcgtaccaactgtgttggtcgtcggtaaaaatgttgaaaaatacattcttgataatacgtctatcaataagtggttagctattcctaatcgtgaaaacatttctatgttcagctttgcgcctgaatatttgtctccacaagttagatatgttggccgtatcatgtccttgaacattgatgtgtacgcatatcttgaaacatatcaagatgatgaaggtaaagtaaagccatttatcggcgatgatgcagctgtattaggtgttcctggtcgtggacgtcaacaacacgcggcagtaacgttacttaacgatgacaaccaattcacaacatatgcaggtatttatgtgcctaattactatgctaataagggcacacaagaattaacgttgactgtgtattctcgttgcgtattgattcctgaaactatcgacgattgggctatgattaaaactaaatagggggtaacctacttatgaaaatcagagtattaaagggttatttagcacatgaaggtgagatgtatggtaaaggcgaagtagtcgatatcaaaaagaaagcgattgcattgtcattgcttgaatctgataagttcgaatctgctgaagatgatcctattgaagtaccggaaccgttggaagtcgttccagatgaaccggaagaagaaatggaattacctgaagttgatgcggaagctgcggtgaaaaaataatgcgatttagagattacctagaaagcgatattgacgatgtattccttaatgaagacgaattcgccgaagggcataatctaaatggcacagtagctaaagcggttatccaatcgccaacggcgagggagtcattcctatcgaatggctctcacgtatcaaatgacggattgcacgggatgtctgtatttgtgcattgcaaattaaaagacatccctgaaattccatcacaggggaacgtattccgattagatgatgatgtgtacatcgttcaaagtgcaacggaagaagatggacttgtgtctatcgaactcagagcagaagctagaggcggtgttgacggatggttgagctagaacttgatacaagtgcactagaagcaattgaaaaagcactggaaaggctgaaaaaagatagagttcgacgtatctacagagacgcctcaaaacgtgcgataacaactgcgagaaaagtaggtataaaagcactaggcaaaatctatgtattcaaaggtgtatcggtcttaaaagccagtatacctatcaataaattgaatgatggcgcagaaatgcgtatcaaaggtggatatactagcgctcaaaagtacttcaaaattaaatcacttaagcgaaaaggtgtgtttgtatcgattaaaaaaggtatagaaacaaatgtgccaaatggttttgttagtaaatccggtatcttcatgaaacgccaaggcaaggaccgatacccattaaaggggatatatggaccagccttaccgcaaatgtttggtaatgaaactgttatgaatgccatgcaaaaagaaggcatggaaatgtatgaaaagcgcctatatcacgaattagagcgcgcgttaggaggtaactaatgacaccattagacgtatcagacggcattgctgcctatctcatggatgagttgcgcaagctaaatgaaaccagtgatgttaccacgagccctattcgagtatggagcgggttcttaccaagagtggataagaatgaagacaagcgcaagttatgcccagccgtagtagtgcatccgtactctgttagtgatgcagatagttcgacggtaggtattactgtattggtaactacttatgacgaggccttaactaaaggtcatgtcggactatatcacctattagaggtagtgcgtgagcggttactatctgataatccggtcgcacttagatatgaaattaaggataataccgttaatacaacaattcctgatgatcaaccataccctcaatgggttggatatcttgaatttgaagtgtatattccagttattcgtaggaatctaaataagatatttacggataataaagtaattgaataggagacaacgatgaaccctgttgtatatgttgggccttcgttccgcagtagccggctaaaccaattcatggtatttagcgacggcgcaccactgccggaagcggaagaccctatttttattcatttatttgtgcctttagatgaactcaatcaagcaatgattgatgtgagaacacaaggcacacaattaaatgtattttatgttaacgcattgaagaattataaaggagtgaagtaaatggccttttatcatggcgtcaaaacaagtgagcaagctacctctgtaattgctcctgtccaaactactgccggtcttcctattgtgttcggtactgcacctgtacaccttacagaagaccctagcgcagtagttaacaagccaattatctgctatagctgggaagaagctgttcaacaacttggctattctgaagattggacacatttcacattgtgtgaagcaatgtatgcgcaattcaaattgtatggcgtagctccaatcgtatttgttaacgtattggatcctgctaagcataagaaatccactacaacaactgctacattgacagacaagaaatgcattataaaagctgcagtattgcttaacacattgcaagtatctagtggaggtcaaacaggtgtggccaacacggattacacggcagcatttgatgacaagaatcaattaatcatctctgttatcaaaggtggtaaattcgattccgcaactacattgaacctcacatatgatgaacttgatgtagaaaacttcgattataagaacgtaatcggcggtgtggatagcaatgaaaaggcaacaggatttgaattgattgatacaatctatcatcatttcggtattgtacctggtcttattgctgcacctggattttctcaaaatcctacagttgcttctgtaatgaaagcaaaatctcgtgtaattaataatttgtttggtgcaactactttggtagatatcgatactacacaagttgttaaatacacagatgcttacgaatggaagaaagggaatagctatacaggtgaatctgaagtcgtatgttggccaatggtccgcaatggcgattacatgttccatatgtctacacacatcatgggcattattggtaaatgcgatgcatccaatagcgatattcctacgttatctccttccaacaaatccatgaatattacaggcttgtgcttagctaatggtaaggaagtaatgcttacgcattcccaagctaacttattgaactctcaaggtattatgacagccgttaatatcaatggttgggtatcttggggcaactatacaggtgcatatcctggcacaactgatgttaaggatacattcatttgtgtacgccgtttcaatgattgggatgaccaaacattcatcttaacctattggcaaaaagtagatatgcctatcttgccacgtaatatcaagacaattcttgatagtgaaacaatccgtcttaacggtcttacttctcgtggcttcattttaggtggtcgtattgagtttaaagaagcagaaaaccctacaacagatttgttgaatggtattattcgcttccataaattccgcacacctccaattccagcgcaagaaattgaaagcatttctgaatacgatgtttcttatttcaaaacgctatttcaaacagtatagaaaggggtaattaatcatggcatctatcaaccaagtaccggaagtacttaatgacttccgtgtatacgaagaaggctctgacaactgtttaggtgttgccaaagtagaattacctagtgaatctgtaatgactcaaactgtaaaaggtgtgggtattgcaggcgaagtagaagcgccagttattggccactactcctctatggaaactaaacttacttggaacactccaacagaaactacacaccgccttacaggtggtcgtggcgtacgtttagaagtacgtggtgctatccaatgttgggatagtggtaaagataaatatgtaatcgtgcctacacgtgccgttattcgtggccgtgctaaatctaaagaaaatggcacctatgaatctggcaatactatcgatgcaacgaacacaatcgaaacgacatacttgaaactagaacaagatggcaaggtagttcgtgaaatcgataaatacgcttataaagattcaatttctgatggcactgacttccttggcgatgttcgtgctgcactcggtatttagtctgtagaaaggacaatcactaatgagtaaacataacactatgaacgaaacacatgaacaaacaggtattgaattagtaaaagctggtcattccttacaatttgaaggcatcagtggttacacattaattaaatgcgaaaagtctgctaagaatgaagatagaactatcacagttccagcattatccatgacataccaagcacatgtagcagctgctgcatgcggatgtaaagtagatgatatttatagtcttccggctgctgatttcactagagtgtgcctagaggtacagaattttttgctcaattccgaaaaataacagacctagaacggtatttcaccgagtgtgcgattacgtgtagtaaatacactagcacgccgatggactacttcattcgagagctagacgtggatgagttcatagtccacgttcagctcattagtgatggtatcgagcgcgagaataaagcaatgaaagggagaaaataatggccaataaagtcttagaaatggcgattgccattaaaggtaaactcgatggtgggttatcctcttccgtatctaaagcatctcaggaactcaacaaattatctaatgcaatcaaagaccaacaggcgcaatacaggaaattgcaagctatatcgcaaaagactggtaatgctagtgataggaatgcagcaattgcagctgagcaaaagctaaattctatgttacaacggcaagcccagttgcggtctaatatcgcaagtcagacagcacatcaaaatgcaatcagtaaaatgggcggtgcaagtcctttagccggtgctgcatcagctgcgcaaggtgctagtgctgccgtaagtggtattacaggaaagcttgcaagtttcgctatggttgccgccggtggctttggtattggtgccattatcgataatgtagttaatgccggtgaagcactctatcaattgtcaaataaactgcatatgacaactgctgagacggcgcaatttaagaaaattatgacgttaagtggtgttgatgtagaagcagccgcaaagtcctttgctaaaatggataagacgttggccggtggcggtaaaagtgctgaagccttgcaagggtatctcagtcaatttggtgtatccttgactgatgctaatggcaagttattgcctatgaatcaacagttggatgcaatggctaaagggtaccaaaatgcagtagcacaaggacgtgggcaggaattcatgcttgaaacattaggggccaaaggcatggagcttactaaagtttttgaaaattacgcagatgcacaagcggccgcgtcacaaatcaaaggcgttgggatagatcctaaatcacttcatgaaatatggttacaaatgaacatcttgaaagcggaagctacgcaagttgcattagggttggcacaagcttttataccaattgctcagcaaatattaccggcattgataccggtattacaagctgttgtaacgttcatgaaagataataaggaggctattgccgcagtagtaactaatggattgaaattagcattactgtatggcacggctacaaaacttgcatcaggtattactacaattaccacggcatttaaaggtgtagaaacagcaatgggtgcgttcaaagcagcgggtgcattaataggtggcccttgggtactagctattatggcgattattgcagtaatatacctattagtaaccaattgggatactatctgtgctacattaacatctgtttgggatagtgtatgttctggattgagttcaatatgggatagcgtgtgttctgctttgagttccgcatggagcgccattatatctggtattatggccgtaattaatggattcttatcattaggtctcagcgtatttaatgcgttgaaagcggcaataattgcctatgtaaatctatggttaaacttaccaacatatattggtatggccgtagggttcataataggcattattttacgattaccagagattgcggtacaagttggtactgctgttatatctgccgttgtatcattcgctactgaatgttataacttcgcagttactacatttagcgctatggtcgatgatatttataacttcctaattaacttgcctatgtacatgatcactttgggtgctgaattcgtagcggcggttatttcgtttgcctctgaggcatatgcgacggcgacatcatggattagtagcttggtaaatgatgttattaacttcatcatgaatttacctagtgcatgtgctgatgcgggagccggtttcgtagctgccgcgggccaatgggcaagtgatgcatataatgcggtactagattggattaaacaaattcctagtgctgtatctaatgcaattgctggtgcatgggatagtatcaaggctcaatttagtggtggttttactgtcggtgttcaagctgcaggcggtaatgcatatgctaatggtggtgttattacatctccagaagtcgcattgattggtgaagccggatatcctgaagtaattgtacctattgatggtagtgctaacgctatgaacttatggcaaacggccggacgaatgttaggtgtgagtggtgcgcagtcagctgtagcacctactgtatcattagctcctagcgtgcctgttacgtcctcatctagtaatagtggcgcatctgtacagattacattcgcaccagttattaatgctggtaatggttcaactgatgatattatgtcggcattggatgctaaaatgcgtgaatttgaacaaatgatgcgtagctatacagccggacaacggaggttgagttatgactagttatacaacaatacaaggggatatgtgggatttaatcgcctataaggtgtatggcaacgaacgatacattaatctattgttagaagccaatcaaaagcaccgtaatacggcgatattttccgctggtgttgtgttaacatgcccagatgttcctgctgattcattacctgaattcttaccaccatggaggcgatagtacatgagcttacaaaagagcctagctaaggtccaaaaatggaagaaagatttaacaccacaaacgaagttagcacggcgggcatggtgtacgattgggtaccaacattgggggagtaaggagtcaaaggacatcacagacgatattagtaagtaccttcttgatgtaactttcacagataacctttcagggactgtagatgatgtggccatttcattagaggataggggccgtctatgggtcggtgattggtatcctgtgaaaggatcattactagaagtcgctattaataccgtagcatgggagaaattagggaatgaacaatttacgttgccaatcggcaagtttgaaattgacgaatttgagggcagtagtcttcctgatgtagtcaaaatcaaaggtgtcgctattatcggtagtactgacttacgggaaaaaaagaaagacaaatcgtggaaagctactacgcttaaggcgattgctaccgagaaagcaaaagataataaattaaagctagtatgggatgcggactttgacccaccgttaaaagatgcatcacaaagtgctgaatcagacctcgcattcttgcagaaactatgcaatgatgcggggttttctcttaaggtatccactgagcagttaattatattcgatgattacaagtacgaaaacgtgaagcctaaagtcataattcgtagaccaggtggccaatatcagcctgtacagactaaagagggcgaacaactgcctttgattattaccagggccatatcttattcgtacaaaagtaaaactcgtgaggtatatcgtgcatgtcatgtgaaatacaccaataaggataagaaaactgtgattgaggatacgtttgaagatcctgaccgtaagggccatacgtaccttgctgtattagaggtcaatgaacaggtaaaagataaagctgaggcgaaacgattggctaagaagaaacttagagaagcgaacaaggaagccgatacaatgtcttttagtctccctggaaaccctcttattatggcatcggttacggttaaactcgaaggatttggggtgttcgatggtaattatttaattacgaaagcaacgcatacattaggggccaattattcaacatcgattgatgtaaggaggtgtttaaatggttactgattctatattatctgcattagcggacatgatatttattggaaatgtttcaagtacaattcctgaagaggggaaagccgttgttacacgtcttgatagagaaggtgttgtaacggcgccattatctgtcattaatcgaggtgcagcacatgataaagactattggatgccggctattgatgaccaggtattgtgtattatgttacctaatcggtccggtcgtggtttttctgatgggtttattattggcacattctttagtagtgcggatccaactccagatggtgcggataatggtaagcgtgtgctcactgttcctggagatatgattcttaatgttggcggtacactatctatcaattcaagtggtggcgatgtagtggtcaatggtatttccttagtccatcacgtacatggtggtgtagagtctggcggttctacaacatcgggaccagtataggaggtatagatgtatatcggttatttagcggatatagtattctataccgcattagacaatgttcttactgtatcagatgtaacacgttcaggtagtgctagatgggaaaagcataatttaatgctagaaaaacctgtaaaacagtttagtgggccagacgtagaacaaattacatgtaagattcttatttcttcatcacttggacaatctccggatagtactgttaagaagttgcgaaaatatcgcgatacaggggctgtattgccttttattattggaggtaaacctgttagtcaaaactactttgtcattatgtctatgagcgaagatagcctatttacggatgcatatggcaagactcaatctattgaagtatcactaactcttgaggaatatccggacaagaacacagtagaagaaaagtccatgcttaaccaatatgggcagaagttcaacaaagttaatacgatattgcggaggttctagccatgtcagcaacgtatgaaattaaaccagttacggacaataggatatcgctagcacctgaaagtgaagtcgctgagattttgcagaatgtgcaaacaattatttctactgttcgtggtagtgtgccactagatagggagtttggtattgatggtcgcattattgatatgcctatccatcaagcacaagcgcatctatctaatgacatattccaacaaattaaacggtacgaaccacgtgccaaaattagtgatatatcctttactgccacacaaaatggtgagttaattccgaaagtgatggtgactgtatgagattatctgatttaccgaatgttgagttttttaacaccaataaagaacacgttcaacagaaggtatttgatatttacacaacaataacagggcgaaccttgggcgagggcgaccctgttactttatttttaaatgtaatttcggaaattattatccgattattgaacgatgcaaattatgcagctaaacaaaatctattagcctatgcagaaggtgataacttggaccacgttggagcggttcctgctgccgttgagcggttacaggcaacaaaagcgactacaactatccaagcaacattgtcagcagtgcgcacgaactctgtcattattccaaagggtacaaggatatccacagaggatggcgaatatttcgctactgttgaggatttggtaattttaccaggtcaaatcaatggatccgtaaaagcggaagcgcaacgtacaggcgcacaaggtaatgggtttaaaccaggtgaaataagtacaattattgatcctatagcgtatgtggatacaatgagtaacactacattatctgaagggggctcagatacagaagatgacgaggcttatcgtgagcgtattcatgaggctcctgaatcgttttctgtggccggtcctgaaggtgcatatgagtatttcacgaaatctgcatcacaccttgtggccgatgtaggtgtatcctctccacatcctggggaagttaacatttacccattactatccggtggtggtattccaggggaagaattactcaagactattacgaattatttgtctgataagaaacgtagaccattaacggataaattaactgtattggcacctactactacgcaatataacatcgacgccaagtattacattgaaaaaggtgccgatgcaactgttgtaaaagctaaggcagataaagcggtcaatgattatgtagtatggcaaaaatctaaattaggccgtgatatagtgcctagtcgattggtgcaaatgctcatggatgtatctggcattaaacgtgttgaagtaacggcccctgtatttactccgattgcagaacaaagtggcgtggcagtagccaatacaatcgccgtggtgttcgcaggaagtgaggaagaatgatacgtgatagtaagtatacaagcgcggaatatcttccctcctcaatcgacagggagccaataaaggcccttgctaaaacgtgggatgatacgctagccaaatttatgaatacgaatacactgctattgtggtcatctattgatactgaatcagaaagtgtaattgatcatttagcgtatcaattacacgtcgatgattatgatagtgggttaccaatagctactaagcgtgaattggtgaagaactcaattgatattcatcgccataaaggaacgcagtatgccgttgaaaaggctgtacaaactgtatattctgattcgaaaattgcagagtggtttgagtatggtggtaagccttattatttcaaggttacgctcattacggcaccattaactggtgaatcggacattgctaagcttgtacgtgctattaatacagccaagaatgtacggtcctggttagatggtattgaattcattcgacgaattaatttcaataagtatttcgccgggtggtgcggtgtatctaaaaaggtgaatatcaagtgtgatttcacgaatgcatggcgcattaatttgaatacccatgtaacgtcttacactgttgaatctaagaaaacgaagattaatgtaacgctagataatagcgttagataggaggaatatatggcagaatggtcaaatgcaaccatgactgatgttggtgcagatttgcaagcaaaagtaaatgcaggcaaaactaaactgacatttactaaaattaaagtcggtagtggtgttaacgcaacgaatccattggcactgactgatgtaatctcctctaaatgggagactactaatttcgtagttaaacaagaaggtaaaattgtaagtgttgatacgttcattactaataacggcattacggaagctttccgtatgtctgaaattggattatttgcacaagatcctgataaaggtgaagtattgtatgcataccttacagaccctgaaccagacagaatgccggcagcaggtggttcggtagtcgtatcccaagaattaacaataggaatggtatttagtaataccggaaacgtatcactaactgttaatatgggggcattggtaacgcatgagcagttaacagaagccgttaaacaacataatgatgatgaaaatgcacacggcggacttcttcaaaatttaaagagtcaattagctactcataatacaaatatttcttcgcacccagcaattacaaatatgattgcaaaaatccttggtgcgactaactggcaagaaaatccagttgctactttgaaagatataaaaaatcttattggaatgggcggtattgtagcacaaaggcttgaagagaatgggtttgtgaagttcgccaatggattcactatccaatggggaatagttaaaaggggccgtattgatatgtggtatacatcacctacacaatttccaattgcttttacggaagtatatgtaggagttggcactatattagaatcagcaacggagcgttcttctagcaattttgataatgccattcgccttagtttagacaaaatcgaatttgcaaagtttgaacattattatattgctcttggcaaatcctgaccaatgccctccaatgggtaaaaactaaagaaactgcacagaataatccgttgcctttccctatagcatatagtacagatttcattgcgggtgttgcttgttttaatgacggccctactagctatgcaccatggactaaagtaaataataaagcaagttattttgctggattaagtggagattggagtccgtattatgtaaataaggaaataacttgtatattcgttggaatataaccaatggggatacaagaaaagcgtatacatgtatgatggaactacttatcctattacatttcctacagcttttgataatgagtgtttaggcatttggccatctatagaacacaaaacatcggtaggaggtaatgaggtattctatcatagcaataaaagtacaacgggatttactcttattgctgatgctagccatgctcaatatactgttgatggcgttgtatatttagcgattgggaattaagctgtaacaccaaacgaaaatacgctgcattcaatatttggatacttaaatacattatcattcgtgaaccatactttgaattttaattggtcatattcggtgattaaattccaatctgcttcacgtggatttttgtattcagccttagcgaaaaagcagatagaataaggaagtatccaattatgatattgcccatcctcaccacttactccccattggttagcatattcctaggcatatccagcttattcctgtcatgtaatcatctatttgtactttgaatgatgttgacgttttagcaatcacagtacaagtatgatctagtgcatcattaaagttagtgttattagattctcctactggaagtgctacgtatttaccgttgcaaggaagtatcaatgaaatagaaataatcctattaacattttttccatctgctatatgtccccattggctaaaatccaacagcaccccaccgtatagatgtaacgttattttgcgcagacatataagtgaagttatttattgttatttccttaacagcactactcgtccaactatcattatctaacgttgacggcgctatgttagtgactgcgacgaacggaggaaaagtaaaaggtattataaagttactagctccatcatatatagtcctagcaactgtaatgtctgcctttccccattggttacgataagcctatagcgatataactatgtccataaaatctaaatgcaatatcagttgatgttagttttattgcatcatcataattatttccacttggacttccagttgaaggagaaatagaccccactgctttaaaaggcgtactaaatctaatcggtaatgtcgcttttgattgatattctgatgtattgtgagaagtctgtccccattggttatgaacctactgtaatccaataaagccctgtacatctatcgtctacacaagctttaaatgatgtcagtgttttatcaattctactaatagcagtttctctatctaaattactatcgtatgtaggatttcctaaatattctggaactacaacaggaatgtatttataactatatggtagtaataagctaatagtaaattgacgatatgcagatagattatctgttttatatccccattggttaaactccgatagatatccaatgtgttacaaatccatttctgctatcactatgatctagtacgaacttatcatttttgtacaaacgcgtaccaggacagtttacgcctgcacctttacttgcatacacgccgaatacctcttgagtgtatgcaataggaaatgtaacccaaacagaatgtgagtatctatgagcaatctcagcattagtaatagtagggtcattacgtgattcgttttcagctccccattggttaacttttcccgactgctatgaagaaatgctcaaatcgagcaaatgatattgttgtatttgtgtactttatagcgttatcggagttatttgaggatggtcctttggcactatctggcaatcctgttgtgactgcatatacattattgaatgcaattgggaaattggtagtttgcaaataccatgaactatcgtttccacgtagtgattttccccattggttctatggcaataactcaatggctttgcggagttctcgcaattctttatgcgtgtagactttggtcgtaatatctccatgcttatggccgagaatggcacgagttgcagtaggagatgcgccgtatttatctaataaggtggctactgtatggcgacagtcatgtgttgaatgagaacatttgatagccgtcattactgatttaaactgcttgctaaattgagcataagaaacaggtagtattttatcagatgaatcctgatacagagttgtaactattggtaatattcgactatgaataggaattaaccgattacggccagcctcagttttggattgacgtactataagacatttagtgcggaggttaatatcgttcttacataacgatagcaattcaccgcatctcataccggtataaagaagtattagagtgccatatgtatcggtagtattaaggcaccataatcggttaatttgttgacgagtgaatggcttatgaggatacacactaacatcatggccaaggtttaagaatggagtgtaatctttaatatcaacatcattaacaattgcatacttcgataataatgaaagtaatgtgcggaccttcttggcagatgcataagaaaggccattatctctcatattatcaatcacgcattgcatatcagaatatttgattaagttaataggaatattagcaattgattgaatatgatcataggcaatgcgatatgattcaatggctgatttactcacaattccaatgcgagtaggcagccattttttatataaacttttaaatgtttcaacacatgcacttttgcggtgcatgcgaagatacgcatttcttgggtagtgcttaacagtactattcatatgttcctccttattaataacgaaaggataaaagaaatgaataattatatccacgtacttgatgcggaaggtcgacgtattacatcaatcgtcgatagtatgttagcaccaattggtgagagtgctttacttgaacaagctaaagctcaatatccagatgcggctgactatgtgtatggtgatgatgctatgcttgatgaatttttaaatggtaaagcatacgtaaatggtgctttcattgatattccagtaacggaatatgaaccgacaaaagcggaacgtattgcacaaattcgcaaatactatgacgaacgatttgcaacgttagaccaagcgttactacgtagacggttagctaatgtgccatatgatgatttacaagcacaatttaaaaaactcaatgccgaaatggtggccaagattaaggaggtaaaataatggataactacgaaatcaaatctgatgtaccagtgatgcacttttgtgaatactgttgggcaactttgaatgaggacggcacgtgtccgacagaaggatgcgtgcacaatgatttaatggctttagataaagaagaaccataagggcatggggggagtgaatggatattcttaatgatattttaatcatgctcataagtggggtatcgcatgaacatttagttagtatgggagtagtgattattttaaccactacattgttatttgtggacactatacaacgaattgctgcagaagtgttgcgatataacaaggataattacaggcctaataatcctattacgctactaacaacgttaacctggtacggctggggaaaaggtaagtatattgataaaacaaccggggaacggcgtagatatttaatgagtgagcgcctaagaggtgatctgttaaagaaactatgcatacaatatccggcatggatgatactatccattgtatttatttcattacctgatattcctattccaaatacagacttattcctagaccatattttttcgtatgcgtttatgttgataccattttttgccgaatgctggtcaatcattgaaaacctacgtgaaatggtagaagatgacctaatcgacatcggcaagatatttcaatatacgattgaaattataaaggcatggaggggcaatggataagtcagctatcattaactcaatcaaaaaatcatatcaatctgtgagggtggctaacttccaccctacaggtgttcttgctacaagggtactagtactaaccatgctagtacctattttgctagtggtggttgagtacattatggtgttcattcaagggtatgtttctgatgatatgaataaattgattaatgtaggtattaatatcatagatcatatattcattccgtcagtattaactgcattggttggtttccttgccttatggatagataaggacggaaacggaatacctgacaaattagaagaacaacctaaattaccaccattacaaaacatgccagaaaggagtgataagaatgaaaaaaggatttgatatttcagcatggcaagagaacgaaaacggaacaccttattatgatgagtgccacatgcagcaagcaaaagaagaaggcaatgaattcgtaatcattaaattaggtgaaaactataacgttgatgaattctttgagcaacacatcactgcagcattaagtgtaggccttgaagttggtgtatattatttcagccatgcatatgatgatgccgccgcagtacaagaggcggaatgggtgattaacacgctcaatagttatggatatactgattaccatttgcaagctggtatttggtatgactacgaagagcatagacaattacgtaatatgatcaatgctggtgctttaactagccaagggatgacgaattgcattagtcggtttgtgaatacattatggagtgcaggatttcaaaatgtaggtgtatatagtggttattccttattgtgggatgaaacatatgcatatagtcaaatgccaagcgttcctgtatggtgtgcacaatatgattcacaatgtgattatccaaatatcagaatatggcaatatagcgattgtggaatggtagctgacaaagaagtagatgtcaactacatgtatgactagggggaagtatgaatgataaaatcaaaaactttattcacgctcattacatctctgttcctatttgtattgtcctttgtatcattgcctgtatatggttctacgccagccgaaccagtaacattgacaccacaggaatacgcaacgctcaaaacgaacttcgacacgctagagagtacaatcaacaatcaattgaatacaatcaacgagttagagatacagttgaaaatagccaaactctcaacgagcgaacagaagaacgaattgataaaagcattgaacttaattcaagaacagaaaacgcaattgacagaggcacggaacttactgcaaaagcaagagcagatgctgaacgagcaaaaactatcattggccaaagccgagatatacttagaacagcagaagaacgaaatcaaaaaagcgaaagcacaacaacgaaatagtaaattattaaatatcttattaggtggtactgtaatttatttagttgcgaaaaattgaggtgatccatatatctccatagcgtgtaatggtggatgcacgcaactatcaactattagtttacagttgagtagtaaagcaattatttataactgaatagcataataaatagcctatcagcttagaataaaatctaggttgataggcctttttgtttgtaaatgatataatataggcaagtagtattttaaaaatcatgggggagtatatggatactatattaaatgactacattcaagactatttacattcagacaaattcatagaaatgttagagtattttgttgcaaaatataatgagaatgcagatagtatcagaaaaagcggattacataagagtgcagaatttttggatgatgccaaagataaattattagtgattttagataaaataaaagctggcgaaatgttggataaatctgatgcggacattatattaaacaacatacatttatccgtccctaaaaagaaatgatagcatataatacaaaagcctactaacctagattaaatctatgttggtaggttttttttgttgttaaaattaaaagaaaacgcttgcttttatactcgatatagggtataataatattgtaaggaggtgatacaagtggacataatagaaaagctaacaagtttagcaaatgcgctaacgccactgctactggcactagcaatactaaaacttgttagcaaagagtaaaaagcaggcgggtgaaagccccgccaccttcttaacatcattgtaaatcaacgaggtgaattatgcaatatttagaatggttgattaatatagcaactattattgttttgatattagtaattaaacgtttagttagagggtgatgtaattgaaatttgagttagatgatatcatgacaacacaagaggctgcagaacggtggaatgttactgcggactcattgaaacagaattgtagaggtcgtgtaaagaatggttttaaagaaggcgagtttaagaagtcggggaaaatgtggcttgtaactcgccaaggaatggaaaggctatatggtgaagaagtggatcataatatataatgtatatattctaaatgacatcattttgacatcattttatttaaaaatatagtgaaatatataactatatagatattaataatgtagataactactggatttgttggttttgtaaatatgtgttaaatgccacgccatcttgagggggtggtgagcgtacgctcgtgagggttcaagtccctccaaccgcaccatttctacaagctaattaatagatggtaacgaattgtattaaacaataacggacatagaatttatatagctatttggaaagggaagatgtaataaatcgtaacgcattgtaacgataatttgccccttttctgcccctaaaaaaataaatatttgccccttttatatgagggttataataggctactgcatatgatgcggtggtttttttgtttgtaaaaatcaaaataaacagttgtttttggtacacaatatagggtataaagggtgtaagaaggtgaaacccttgaaaaggaagaaaataaaaaagtggctaccgttaataaccgcgtttatccaacttgaaatagcgataatacagttattaaatcagtaaccacaaaccacaggggctcgaaagagctccaatctttcttagtattataccaatggagagcatatgatttcaagattaactttaataattagtattattgcccttatattatcggtttataatttattagtaatattagggctactgaaatgaaattagaggatgtaatgacaacacaagaagctgcagaacgatggaatgttacggctgatgcattgaaacagaattgtagaggccgtgtaaagaatggatttaaagaaggcgagtttagaaagtctgggaaaatgtggcttgtaacccgtcaaggcatggaacggctatatgggaaagaagcataaataaagatttgtcttttcatcgtttcttcatgtatgattaatgaaagggttataaactaaatctaacaaaggttgtgatgttaaggaggcaaatattatgaaaggaaaaggacaacaaagtactatctatgatgttgcaaaatacataattgataactttggaccaatgtcagcaatgaagctacagaagttagctttctattcgcaagcaatggcattagtgtgggatgatgtacctatctttgaagatgactttgaagcatggccaaaaggtcctgtttgtagaaatctatttcaaacacataaaggtatgttcatgattgagggttcagagttcttagaaagttatgaaccagatattaatagaatcagtgatgatcataaagctactatagatgcagtttgtaatagccttaaagatgtatctggatatgatttgagccaaatgacacattcagaagcaccttggttagatgccagaggtggactgccagctagtgcacattgtgatactattattaccaaagaagccatggaagagtattaccaagggaattggtaatatggcaaataaaaaaggtagagcaacaataaagaggtctgaaaaaccactatctaataggcgtaactttgatacagagttatttaaatggtcttttaaatcatattacagtgaacatgaatgctggtgtagattagctgggaatgatgttattactaatattattcataagttagaggactattctacacaaacatggtctgaagtaaaatctgcatctggtggaaaaagtgaaggtaatgggagtaatagccactatattccagctattaaattgccaaaagattatcaagagaaatatatcaaagatgggtatatgagaaattttgaacaagtattctcgttacgattaactgcaaaaaagagattagttggatatgtatcaaatggaacgttctttccgctatggtatgataatgatcattcagtatttccagttaatcataagaggtaacaaaagcaaaagccactgcatatcataatgcggtggctctttttatcgtgaaagcttagtggaacaaaattgtgacaatgaattttagtagcggaaaattccgccaccaaattttaccaagaaactacacatcaaaatcgtgggaaagattataaagcataccttatgaaccgagatggcttttcactccttgccatgggatttacaggcaagaaaacattacaatagaaattaaaatacattgaggctttcaacgaaatggaaaagacattaaaacaaggctatttagaagagtctgtaaaccaaagtgatatacattgtaagacctataatggtgtacctatcataaccattggtgattttgcagaaatagtaaaaagaagtagaacaagtattctatggcatttaaaggataaaggtcaacatatttgatagtacaggggatttagaaaaagtggttaatacttgcattcaataaaagaaaaataacggttgcccctttttgaaatgtagagtttaaataatgtagtaatgatgcggagtattgagtataaactctcaatccgcaccaaatataaggatctacagttcgctgtaggtcctttttctatatctggattagcagagttttatgggagagagatatgattaaaaaaagtattgccttatgcatgctttcactagcattgtctagtcaatctagtttggctgtatcagttgaaaatcaaagtcagacggtaagtgttggaataaaaagtaatataaaatctgaagattctttaacatcggagtctgttgaggtaattcctggagcttttaaaagtgttaggaagagtaattcaaaatatccaagagagctttcagatgaagaaattaagttgttaaaagtacaaagccagaaacgatctaaacagcgattagtagaattacaaaagtcagatatgaaggtggagtatcaaatttttgatcccctttataatgatcgggatgaaaaggcactcaaacaaatcatacgttacaatactttggaaacaaataagcaaggtattggatatggtaatcgagataaaccattacgtatcgtaagcccttatatgagaaaaaatggacacggggaaattaaattaacgcatccagttaatattccatcctacagaacgcgtgcagataagaataaagcatatgataaagaatttaaagcctttctagaaaagaataaagggaaatcttatgatttatatacacctagaactaaagaggagataaaagaatcaatagaggcgttttttaagcccatagagttaattgagtatcctattaataatccaaaggattataagcgagttgcggccattccagggtttcctaaacaaatacctagctttgcaaagaatattcatctacatagtaatcctgcattcttgcaaggcggttcatatgtacaactagcttttggtggcacaccagatcaattgaagccttacattgatgaggcacggactgattctaaagttgttatttcgaaatctgatctatccaatgtctatgtaaaaaactatgttgattcaaagatggaatatgcagatactttgaaaacattaatgcctacatcgatagttgttgtaaaaaatacaacagtagctatgggcaaatatgtacaaaatcgagtggataatcctattgagaaatctgttgatgaaatatatgaattagagaatcaagtattgactgagtttaataagattaaaattgatggtgaaagtagcgatgctaagtataagcgttatatagaaactcgaaagagagtagaggctgagcgagatatattaaaacctaaacagatggatatggtaagtttagataagaaggaatatcctatttatacagagtcggagaatcgaaaactacagaaacaatatttacatagattgtcttttaatgaagactcggtaaaattacctgatgattacgtaatatatttatttgattttggtggtaattggaatcatccgtatgcactgggggcagcagtgagccctgagagaaattatattatttatttctgtcagcaaggttaattgtaggttttatattgtaattagctgatttaatctctttataaatagcaattattaaactaaaaataaattattgacataaaatattttaaaatataaaataattgtagacatactggcgtgtcaaaaagggattagagagtttagccagatacaatatgatatagttcgagagatctatatacaaattaagacatgttacgagagagacgagagaagagtaacatgtcttttttgtatacctaaaaacagataatagctcgttttatatagtataattacagctttttatactacggctgataaataaatatagtaaaaaataaataaaatatggatgctacaagaaattcgtgcagaaattgctgcattaaaagcaagtatgacaaaataatataattagagttatagacagacacctccttatgtattacaatgtaatacataaggaggtgctttgtatgtcaaatatttctgttagacttaatgaacaagaagaaaatctatttaaaacctatgcagaatttatggatgaaacattgtctacactatttaaaaaagctttactagaaaaaattgaaaatgactttgatcttagagtaggccaagaagctctgaaagaatataagcaggatcctgttacatattctgtagcggaaatgcgtgcaaagtatggtttataagctagagtttagtaaacggtttgaccgacaattttcaaagttggataagtcaacacaacgttatatttttaattggctgataaaacatttggataatgtagaaaatccacgatattctggtaaatcgttgactggtaataaacaaggattgtggcggtatagaattggtaactatagagttattgctgatattagtgatacgaattgtgtaattatagcggtagaagtaggtcatcggaaatttatttataagtagaggtcataataatgaaatacttacgtcgtgaattaaaccaagtagaaaaggaatatctcaaacaatttggtgaagattctttaaatcgtgttatccttcatgacccaaatacaaaggataaacaagaggttcaagatacgattgatattttgaaagaagcgatagccaaaaataaacctctggaacaagtgccagaggatatgtggaatcttattgaattctaatgtaaaagacacattgcaaatcattgcaatgtgtcttttgtgttataagtttatagattatacagttcaggtttacgatctctaaatatatttattttgttacgaatgtcttcgacaacggcaaaatcaatttccacagaagcgatgccttccttagtatccatttctaatagatttgtaccccatggatcatatacagcagagtgccccgtactttgaacgcggccaactgtaccacagccatttacagcacatacaaatagttggttttcgatggcccgtacttcattgagtacttgccagtgtcgtagacgcatggtaggccattgagccggtacaaatagcaattctgtatttggtaatgcggccatgcgcactaattctggaaaacggatgtcgtaacagatgacagtactacaaggaatgccatctaactcaaaatgtgtggtatgagtgccacctgcaaaatagtgatcttcttttgcgggactaaatccatgcatttttgagtactctccgacgagttcgcctttgcggttgtaggcataggacgtattgaatacgacatcatttttggcaacggctacggaaccgcctacgatatttacgttatgctcttttgcaaatgtgcttaataatgattttgttcgttctccatttctatcagcgatgttgattaattctttagatgggtaaaaacctgtgttccatgtttctggcaatacgataatatctgggctttcagaaagagactgaacgagtaactcttgaacacgattgtaattatattcaacgtcattgacatggacgtccatttgaataatagttaggcgttttttcatagtacatcctttatttggtgaaatggtatcgtttatgtgaaatatattataattaaaatattaaaacattattgagtagattacaatcacgggtaaacaattcgctagtttttactattctccttataaatgatataatataagttattaaattgtgtctatataaagggggacctatgaaacgattttcattggtagtgcttttcacaattgtagttgctacagcgttagcaggatgtggaatgctttcacagcaaacgacagaaaatgaaactaaaacgccacctacacaacaggttacgatggtacatccgtcgggagttccggtactcatgtatcataagattggcgatgataaagataatgatgcggttatccgcgaggatttattccgtcagcaaatgaagttcctcaaggataatgggtaccatccgttgacgatggatcaattatacgattatgtagttaatggtgcagcggtacctgaaaagcctgtagtactaacctttgatgatggttatgcagatacatactctatcgtgtatccattgatgaaagaatatggttttgctgctactgtatttgttaatccaggcgatgtaggaacgcggcttacatgggaacagctaaaagaaatgaaagacaatggtataactatttctaatcatggattccaacacgtggaaatgggccaactttcaaaagcagcacaaatggaaaacattcaaaaagcacaacaggcgttagctgataagttaggaattacagataacccttggttctgttatccctatggggacaaaaataaggatacagatgctgccacaaaagacagtggtataaagatggcaatggctatgaagtccggttgggctcatacaggggataatccatacaatattttacgtgtttgggttggtaatgccgtagacatcaagcattttgaagaacgaattagcactgaacattacagtgatttataaggagatatacattgtttaaaaagaattgggtaaagttcatcattatggtgttcttatttaccgcagtcacatcaccatttgtggtattgtttggaccatttaataatgtaaaacgtgccgtaattggtgctatcttacaatctcgtcatcctcaatacattacatggttattcagcaacgatgaattgcaatctattttggggacagtaggcgttgtaaagagtcaagatttgtttaaatttaatgctcgcgaagataaagacttaaaattggaaaaaattgagtcttctcgttatgtaggatacgtgcttgaaattccagatcctcgtcgtatccaagttgcgacagctgcaaacattcaagaaaaaggggatactacaagtaatattgctaaaatgaatggtgccgtagcggctatcaatggcggtggctttcacgatcctaatggtactggtacaggccgcttgccatatggctttatccttcacgaaggggattatatcatcggtaaggatgtggggcctgatgaatccgttgattttgtaggtttctctaaatctggcaacctcattgcgggcaactatgataaaactgaattagctgatatgaaagctatggaaggtattacctttgggccacctcttatcgtagatggtaagaagatgattaccgatggcgatggcggttggggcgtaggtcctcgtacggccataggtcaacgtaaggatggtactgtgttgttcgttgtaatcgacggccgtcaaccaggttattccttgggtgctaccttgcgtgatgtgcaagatgtactttatgaaaagggtgcatacattgcggctaacctcgatggtggctctagctctacattgtatttaaatggcaaagttgtaaataaaccagccgatttgttaggggaacggatgattcctacggcgtttatcgtgaaataggaggaacaatgaaaccttttacgcgtgtactgagcgcctttgcggtaggtattctactgcaaggaggggtgtatctgtaccttgatcaatatatgtttgcaccgactacggaatttaacgtctctggtgcgtctaaggatgacacgaaaaacttccctgacgtaaaggagggacgtaaatacgtatcttatgaccatcaatttatggctgttgttacagatgaatctcttcggatttataaggctggtgaaagcaagcccacaacggttagtttgaaaggtcgctccattagctattttgattggatgccagatcgtaactacgcaattatgggcctgtatacggacaacaaggttgttatggcccgactcaatgcagatgatccggaacacgaagtagatacagaacttgaagatgtaccaaagggaagtcgcattgttgatgcggcctattccgaagcgacaaatgtggtgtacatgaaggtaaaagttcgtgaaggtgcataccggatttacagaactgatgcgaactatgatacgcgtcgcgtttacatgcaagctacggacattggtcgtattgctgtattctatgatgaagataatttcttctacgataatgctaaaactggcgacatcttcatgtttaatggtattgaaggtggttggcgtgttatcaacccacctggacgattccgtttgcttggtgtagatactagcaagaccatctatattgctcgtgtcgatgaagataataatgtattaactgtatactctggtaaattaggcgtaggatttaaacccatttataaatacaataatccgactaccttgtctgaagtaactatgaatgcggtgaaagaaattattgctaatggcagtgatgatacgaccaaagtaacagaagataacgataaatcatctaaagactctagctctaagaaaaagaattaatataaagcctttataatcgcaggttataaaggctttatttataaacttatttagttttatacgacataattcaagttgaactcatatatatttcgttataatcggtatatgagtatacgagatgatgatttaacgggcgacgataatacatgagaaaggcggttgtctatgaatatattgtttgtacggctcagttatattggtgatatactgcatgccacagccgccgcaaggtggataaagcaacagtatccggatgcaaacttacattggattgttacacctagcatggctgaactattagaacataatccctatgtagatcatataattccttgggaacgggatgaatatgaggctcattcaaaaaaattacaccttcgtaccatgtggaacatgtggtgggatttacgaaaacgtttaaagccttatcacttcgatatagctgttgatgtacaaggccggcttattacggggcttgtactattggcatctggtgcacctatacggttaggattagggggtactaaagaactgaattggttatttactaattacaaatcgaagaatcggtcaaagcatgttatagagcaatatcttgatgtagctaaattactgccaggtgcattaaacacagagactattcctgttgagactaagaatatgaatctaatggatctcattgtaacagctgatgagcaacaacgggctaaattcgaagtggaaacggcgtttgcagaaaaagatagaccgttgataggtttagttttaggttcatcatggcagactaagtcctggccttatgaaaagtggcaacaactaattgattccctgtcctatagaagcaattttatatgcttaggtggaccaaaagaagcacaagagtttgaagaattgatgcaacatgtagagaaagaaaatttgccagtttacaataaattaggtaagactactttacgtgaaatggcggctcttcttggtgaatgtgaggtggtagtggcctgtgatacgggtgcactacatatggctgtggctctacaacgccctgtaatagctttatttggccctacaaaccctgcagagtggggacctctgactggaacctataaagtgctacaaaatcatgatatggagtgcttaggatgccgtaaacgaaaatgtccgaagggaaaagcgtactgtatgtctggtattgatccagttatggtgaaggaacatattattgaattattaggtgtaaagaattagacttaaataagagtgataatatataaagttagttagaatacgcattatgttggtcgtctaactagtagaataggagagtatataatggcaaagtttaaaattcaaaaaggcttatcagacgcagaaatgatgaagcaatgggggggaaatgataactttgaagaaactatgatgcaggcggaacgcaatgcagcgaaacctgtgattcatcaaagtcctaagcaaacacaagatgcattttatcgtgagtttttaactgagaaggtggaaacacttatcggtaagatgctgttagacattaaaatggagtattttaaagagggcgaaggggcattctctatccaagtaaaacgagatggcaagaatattgttcttgaaacagcacctaaaaaggtaaaataaaaagtatatttgaaatagaaaatgtatattcatgaatattagattatctttgtcagtcatcaaaaaaagtgataacaagatctgcaaatcaagataattcgttgtactacatcaataaatactgatatactttcgtacataaataaaaattataacgatatgaggattagtttgcttttacattctcattaacatactcatttggtgatgattaaaaatgcaagataaaatctagcatgacgagagtttttggtgattttttttacacttttatatcaaaaatgcatgctttttgatgataaataagcataatatacttgttgacaaagaattttagaagtagtctaatataagtatgttccaataattcctagtatattttacctacataagtaggaactataggaattgttgataaataggtatgagatagtcattgagtgtatgtataaaattacatcaccttactatttcgaattggaggattaacatggctaaaaaattaagaatctgtgaaaccgttcttcgtgacggtcatcaatctattttggcaactcgcatgcgttacgaacaaatggaaccagtgcttggccttttagatgaaatcggttatgaagctcttgaatgttggggcggcgctacttatgatagctgtcttcgtttcttgaacgaagatccatgggaacgtcttcgcaaattaaaagctaatgtaaaaaatacaccactacaaatgttacttcgtggccaaaacttgttgggctacaaacattactctgatgatgtagtggaagcattctgtaaagctgctgtaaaaaatggtatcgaccgtatccgtattttcgacgcattgaacgaccctcgtaacatggaagctgctattaaatattccaaaaaagcaggcgcacacgttcaatccgctatggtatacactatttctccagttcatacaactgaaagcttcttgaaagttgctgaaactttggttgaaatgggtactgattctctttgcattaaagatatgtccggtttgttaggacctgctgatgcatatgatttggtttccacattcaaaaaacgttttggtgaattgccaatcgacttgcacagccatttcacttgcggtcttgcaagcactacatactgggaagctgctaaagctggtgtagatatcatcgatactgctatctccccatttgctcatgcaactagccaaccagctactgaaactatgatcgaaatgttcaaaggcactgaatgggatcttggtcttgaccttgataaatatattccattagttgatcatttccgtaaagtaaaacaacaaatcgctgaagaattcaacttgaaaccagctagcgatgtaatcccagctgttcgtcgttaccaaattcctggcggtatgttgtccaatactcaaaaccaattgaacgaaatgggtatgggcgatcgcttcttcgacgtaatggatgaaatgccacgcgttcgtgaagacttgggttatcctccattggtaactccaacatcccaaatcgttggtacaatggctatgatgaacgttatgatgggcgaccgttataaaatggttcctaacgaagttaaagaccttgtacgcggtaaatatggtgcattgcctggtaaaatttctgacgaaattcgtcacactatcattgatgatgaagaacctatcacttgccgtcctgcagatcttatcgaacctgaattggcaggttacactgaagatttgaactccaaaggttacactggcatcactgaagaagacgtattaacatacgctatgttcccagaagttgcaattaacttcttcgaagctaaccgtcgttaatcttaatattaacagctctacctttttggtagggctgtttttatgtttatacgaattttatattttctcttgctaatcatgagtaaaatagcgtacactataaggagtatctactaattatgatattgaggtaatcctgtgaatttacaaattagaatttggatatccaatgttgttctatttgtagttcctatactaatagcaattattctatttttgttatatttttcagggctacgcattttagcaaatgctggatactatttgcgtatcgagcaagaacaacagtttaaaagtgttagccgtgtggctgagactattaccttttatggtatagacaatggtttaatggattctcttgttaaacctagctatagtttgttagaccctaatgaggtgtatgtagaaattctcgatcaaggaaaggttctgtattcttacggtacacaacagatttataatgaatctgctatcgttggcttgattgatgtaaatcctgagttacaggggattgtctatcagtcaaatcatacctttgtgtacgaaatgcgtaagaatgaaggacgtcatgcatatctatatcatatagctattaaacgagctgtgcatggtagtgatagcttgatggagaccgtttcgttctacattagcattgttgcattacttttgtttatagttacattttttgcaatcaaccgatttgtgacgaagttcattatgattcacgtccgcaatatgacggaatcattgcgagctgctaattaccaaatcgaaatggagcaggagcaacaaaaagaattgcttgcaggtatctctcatgatatccgtactccattaactgcaattaaggcctatgcagaaggcgttcgggatggtatcgcgccaaccgaagagcaacaaaaacgctacatgggaatcattttgaagcgcgctaatgatctagattctatgttggaggaattgttccttattacaacattgaactataaaaaggaatctagaccatcagagaaaatagaattagggaaatacgtacaaggttttgtagaagatcatatagaacattataagtctagaggtcttgaactgagccaacgtgttacagttaaggatgctactattatggcgaatccgcagttattacagcgggttttgcaaaatattttaaataatagtgcaaaatataagatggcagatataggacatagtgttattgatgtcaccgaagatgaaagtcatgtgtactgtgtggtaagtgatgatggccctggggttccgccagagtcgcttgaccgacttatgcgtccgttttatcgagttgattcgtcccgcactaatccacaggaggggagtggacttggtctttcgattattagacgtattatggaaattttcgaaggtcgtgtagtgatagaaaatattagaccacatggacttagaattattttagagttcccgaaaaaaggagaaaatcatgagtgaacatattctaataattgaagacgatattgatattgctaatattgagcgtgattatttgatggttgctggttatgacgtaactgttatgaataatggtactgatggtattgaagctgctttgaacacgccagtagatttaatcattttggacgttatgttgccagaaatggacggctttgaagtgtgtcgcgccattcgtgataaagtacgcgtaccaatcgtgatggtaactgcacgcctcgatgatattgataaaatccgtggccttggcgtaggtgctgatgattacatcgaaaaaccattctctccatctgtattgattgcaaaaattaaggctatgttagcacaatataaacgacttactgaaaaagatgttgttgatacaaatgctattcaatccggtgatattcgccttgatcctaagatgatgaaagtttgggtaaatgacaaagaagttcatcttaagaaaaaagaattccaactattagaatttcttatgcgtaaccgcgatatcgtattttccaaagaagaattatattcccgtgtatgggggttagattcgtatggtgattatgcaacagtagcagttcacatcaatcgtttacgtgaagaaatcgaagaaaatccatctgatagtaaacatatcattacagtttggggcgtaggttacaagtttgtataaaaagcatagctaaattcacttttagttcatggattggtgagctgttgatgttatatatgtttttagggactatcttatagagaaataattgaagttttatatattttttatatactatgctttattttttagagattttgtgtatactataactgtaaggattattatgaagatatacggaaaagatacacttaacttctctctcttaataagttctctctcaacttttccgtcttcatatataactctctctcacagtccttacactctcaaactatatgcaaaagaggtattcattagttaatgctaatgaatacctcttttgttttcttatctttttacatataatttaggaatggtaataattgttatattgcaaatctaaggaataagacctataatgagtgtgcattgattgtatgcaattaaaaataggagacaaaatatgaatataaaacaatataagaaacagattatagcatgtgctattgcactatgcgtaggtgtaggaggaggttattatttctttggtacaccagcaggtacggaacagagtgttgtgacaaatcaaactaagcaaacaaaaccgttgactgaagctcgtaatacctatgttgtacaagcggctaaaaaatctggccctgctgtggtaggcattacgacacatgtattccaaaaggatatttttaatcgtaccatttacgcaggtgaaggcgttggttcaggtgttttaatagataatgaaggtcatattgtaacaaataaccacgttgtatccggtgctagcaatggtgaggttacagtttcgctgtctgatggtactaccgtcaaaggtactgttatgggtactgatgaacaatctgatttagctgtcgtaaagatagatccacctaaaaatattcaacctgttgctataggtgactccgattctttacaggtaggtgaaccagcaattgccattggcaacccattaggtcttgaatttaaaggttctgttacatctggtgtaattagtgctttagctcgtaccattgatgatcaaggacaacgtttcccattgattcaaactgatgctgccattaatccaggaaactctggtggtgcattgctaaatgctgatggtgagttaattggcattaatagctctaaaatttctaaagagggtgtagaaggaatgggctttgccattcctattaattctgcaaaacctattattgattctatcattaaaaacggtaaggtcattcgcccctatttaggcgtatgggctgtagatcggcaaacagcggctcgcaataatgtaagctatgaaggagaaggccttcttattgtgcaattggatcctaccggtcctgtggctcgagctggtattgtagaaggtgatacgattgctcaaatcgatggtaagaatgtaagcacattaatcgaattgaaagagcaaattgatgccaagagtcctggcgacactattttagtatcctatactcataatggtaaaatgaaaagtactcaagttacattagggcaatcctcgtctaactaatagttttagaaatagaaaaattatatataaaatcctttcgactggtggaactctagatattatctgcattttccagcacgttgaaaggattttttattttataaaaagttttttacaaggtaccttgcaattcgaggtaccttgtgttattatgtatttgtcagtacatgatagtgaccgtaagagagctttcacattggcaggtaggcacaacctaaagggaggaactatgcaagttcaattaaaaaaaggtgttatggatatgttggtgctagcattattaacacagcaggatcgctatggatatgaaattgtaagtactatttcggaatacatagaaatttctgaaggaacgatatatccattatttaataggctaaaaaaagagaagtatgttgaaacctatttaaaggaatcttctacagggccttctcggaaatattatcatataacagatacaggccgagaggcttataacgagatgagacgagaatggaatgagttttctggcgttgtaaatatcctgttgaaaggagtcgactataatgaataagaaaagttttttagaagcactgcgtaatatcttcaaaaaggcacgtgttgctgatgttgaaagtattatagaggtttatgaagaacactttgctgtaggccatgaaaaaggccttacagatgatgaaattattaaatccttggggactccagaggaaatttatgcatcctatgtagatgctggaattattacagatacgttaaatgaggatggtaatacaagtaaatctgtaaatatgcaagaaatctatgctagatttgatgagtataaagaacgcttattaccacaactgccgggaatggcaaaaaaggcatcgaagacattagttgctattggcagtgcgttagcctatattgtaggcgtacttatattggtaattacgccagctattttatatttattaggtagctcatggcaaccatttgaaaatgtaaccgcatttcctgcgttatctatgataactttagttgcactcgcaggtgtaggcctttttggtggccttacatgtatatttatcggtgctgaacttcgtggtgtacgcgaacgttatttcagcaatgtagattaaggaggacctatgagacgaattataattgctgccattctaactgtaatcagtgctgtaggggtaggtacatcctttgctgtaaatgatttaccaaattttggtgaatggatgaaaaccaatgaacaacagtttagaaaaccacatagacatgatggttctaatatgcatatggaccaacatatgatggatggaaataatcaaatgatgcctcaagatggtatggggccaaataatggtcaacatatgtaccaaaattgtcaaaaccaaatgatgcctcaagatggtatgggacgaaataatggtcagtatatggatcaaaatggtcaaatgcctccacaaggtccaggaccacaacaatctaatggtaatgcatcacaacaacaaactggtcaaggtgcaccacaaactacacaaaactaaccatattttatgagtccttttctctcataagataatagagaacgtggtcatgaaagtgcattcatggccaccgtagagccatacactctacgtgatacatatgtatcagaatctctctcttacacacaataactacacacaagcaaaaagagctcctcagtgaaggagctctttttgtatctgtttataattttatttgatgtgtttagaaccgcgttctgtcatagctacgccgtctttgcagagagggcattcctctggtttgtatgttggcacttcaaggttaagtaatgcttgtactttttcttttggtacaccgaattcagctttgccgccagaacggttaacgagaagacctacgcctacgatttcaccgccggattggttaactacgttaacaacttcttgtacggaaccgcctgtagttacgatatcttctacgattagtacgcgtgtacctggttcgattttgaagccacgacgcaatgtcataacgcctttttcacgttctgtaaagatagcgcgtgtgcctaattctttaccgacttcgtgagctaataagataccgccggtcataggtccaataacgagttctacgttttgatcgcggaagcgttctgccaattctttacacaatgtttcagtgtactttggatgttgtaatacgttgaatttttcaacgtacatagggctatgtaggccggaagtcaataagaaatgaccttctaaaattgcttgagtatcgataagtaattgttttacttcttgttctgacatcatttggatacactctccatttcttcaataattaaacgtactgcctcttgtggatgttcagcctgcgtaataggtcggccaataacgaggcgagatgcaccatcctgtaatgcacttgatggtgtagcaatgcgtttttggtcatttgtagctgcgaaggatgggcgaatacctggtgtaacgataaggaaatcaggtccacaggcatcgcgaatcatcttagcctctaaagcggaacatacaacaccgtccataccggattcttttgctagtttagcaaggcgaattacttggtctgcaattggtaattgaccgccaatagatgtccaagattcgtcatcaaagctcgttaaaacggtaatagccaatagttttggacgttcgatgcctagtttttcagcgctttcacgagcagcctcagcggcagctttcatcattatagggccaccttgaccatgaatggtaattaaattggcgcctaaacgagtaagggaagatacgccatgggctaccgtattaggaatatcatgtaatttcaaatcgagaaatacatgtttgccgtgctcttgcaaatagcgaaccgtttggtccccttcggcgtagaataattccatgcccaccttgtagaaactaacggagtccccgagtgaggacacgatagatttcatcgcatccattgtggatacgtcgagggcgacgattaatctgtcatctgccatgttataacctccatagtacttatatatctaaataattttcacatagaatagggcgtcctgtcaatgaaaatccgttgtgaaagtcggcttaagaactgcttttatacatcggttttcttcgcgttcatgatataataaatacagaagtgaagatgattcctaatacgagttgatatatgtatatcggactgatgtatataatatgttgttaatagctaagaaaggattaccatgttagattttgtagcattggattttgaaacagctaataaatataaaaatagcgcctgttccttagcggttattaccgttgaaaatgggcagattaccaaaaaagcgtatagtcttattaaaccaccgtttatgtcctttgacccagaatgtattgaaattcatggaattgaacctaaagaagtgttgcatgaaaagacatttgatcaactatggcctgctatctatgaaaatcatttgaagggaaaaatcatgattgcccataatgcaaaattcgatatgaatgtattgcgtgccactcttgattactataatattccttggccagaacttgactatgcgtgtactgtaaaaatttctcgtgccgtatggcccgatttggtaaatcacaaattgaacacaatggcggcgtacttaggcgtagaatttaaacatcactatgcattggatgatgctgaaacttgtgctaaggttgccatcgaggcagctcgtttaaaaggggcaaactcactaccagaactgctttcaaaaacaggcgtacctcttgaacctttcatcgatgaaaaaaataaagcggcacaagcagaattacataaagaaccagagccagaacagatgtcatttttctaaatgcgtgctcggttacgattgtaatgaattctgatagtatactagattgtttgggaggtagtcatgttaggtaaagaattattaacctatgtggaccatacattgttaagacctattgcgacatgggacgaaattaaggtgatttgtgaagatgcattaatctatcatacggcatctgtatgtattccgcctgattttgtagcatccgctcataatgcgtatccagaattgaatgtttgtaccgttattggatttccactaggctatcaaacgacagaagctaaggtggcagaaacgaagcaagccattgcagaaggtgcatcagaagtggatatggttattaacttaggggatgttaaacaaggtgattttcatgccataaccgaggaaattaaggcccttaaaaccgtatgtggtgataaaattttaaaggttatcatcgaggcctgtttcttaacgactgaagaaaagattgaactatgccattgtgtaacgggaggtggcgcagattttatcaagacctcgactggatttggtagtggtggcgctacattagaagatgtgcagctatttaagaagcacattggccctaatgtacggattaaggcggctggaggcattcgttccattgctgatatgaaatcctatattgcagaaggatgtagtcgtatcggggcgagtgcggccgtagagctcctaaaaaatcatttggacgaagaagtataaagaaaaaccacctaggcagtgcttaggtggtttcttagaatggtggtgtaattatgcgcatgtatgatattattttgaaaaaacgagcgaatttggctctcacagatgatgaaattcgttttgtcatcgatggctatgtgaacggtattattcctgactatcaggtgagtgcgttattgatgaccatcgtatttaatggcatgaatgctcgtgaactcggtacgttgacactctcgatggctcagtctgggcagatggtgaatttatcatccattgatggcattaccgtagataaacatagtacaggcggtgtaggggataagacgacacttatcatcgctcctttagtggctgcttgtggtggcaaggtagcaaaaatgtctggcagaggtcttggacatactggtggcactatcgataagatggaatcgattcctcatttgaaagtatcattaagccaagaagattttatcgcacaagtcaatcgaattggtcttgccgttatcggtcaatcggaaggcttggcaccagccgataaaaaactttacgctttgcgcgatgtaacagggaccgtagatagtattcctcttattgcgtcctctgtgatgagcaagaaactggcatctggcgcacaagccattctactagatgtaaaggtgggcagtggggcttttatgaaaaccatcgaggatgcccgtgccttggctaaggccatggtagatattggtcgtgaaaatggtcgttccgttaaggctgttttgaccgatatggatcgcccccttggtcatgccataggcaatgccttagaaatacgtgaggtcattgatacattaaaaggtcatggccctgaggacttgacccatgaatgtattatcatggctgcacatatgctcgttttgagccacatctgcgactatgaaactgcactcactcgtgtgagagaggcccttgattctggtgccgctcttgaacgtctccgccttatgattgatgctcaaggtggagatagctctgtgattgatgatgaaaacctactcgctatcggtcaatatacatatgatgtgattgcaactcagaccggttttattacgcatatgaatacggaacaatgcggtattgcatcagtcatgcttggtgcaggacgcaccgtaaaagatgggcctattgattatagtgcaggtatcgtgatgcacaaaaaaacgggcgatactattactactggtgaaagtatagcgaccttgtatgcctctgatgaaagcctacttgctaatgcggctaaggcctatatagaggcgattacaattggcgaaacaatgccaaacatagtggataccatccttgatattgtagaatgaggaacagtatatgatggaattagaaattcagaatcttataaaccgtgcgatagaagctcgtgaaaatgcttattgtccatattcacatttcgctgttggcgctgctttattatgcgaagatggcaccatttacgaaggatgtaacatagaaaacgcatcctatgggcttaccaattgtgcggaacgaacggctattttcaaagctgtatctgaaggccatacaacatttaaggcccttgccgtagttgctgatacggaagggccttgtgctccatgtggtgcgtgtcgtcaggtgatggtggaatttaagattcctcttattattatgggaaatttgatgggggatataaaaatagtatctatggaggaactattaccatttagcttttcggagagcgatgtaattggtaaatagatccttctacagtgaaatatacgtagtacaagaaaaaggctggagcgcgtggctccagccttttagcataagataatgaccattagaatgcaggaacaattgcaccttggtatttatcttgaatgaattttttgatttcagggctatgaagagcttccatcaatttcttgatacgagggtcgttttcattgcctttaagaacagttacgatatttacgtaaggggaatcattagattcgatgaacaatgcatctttaccagggttaagacctgcacttaatgcatagtttgtgttgatagctgctagtgcaacatcgtcgatggaacgaggcacttgagcggcttctaattctacgaattggtaaccattagggttagaagcgatatcttgtacagtggataagatattattggagtctttcaatgtgataagaccagctttttgtaataacattaatgcacgaccaccatttgtagggtcattaggaatagcgatctttgcacctttaggaaggtcttttaaatctttgatttgacgggaatataagcccattggttcaagatgaacgccacccacagatactagaggaaggttatgtgcttttgcgaattcgtccatgtatggcacatgttggaagaagttagcgtcgatttctttatcacctaatgctagatttggtgtattgtaatcagtgaattctgtgatttgtaaatcgatattatcttttgctaaaatcggttttacttgttctaagatttccgcatgtggtactgcagtagcaccaatttttaatacttgtttgtcaccgctgctagccgctttattattatcgctgccgcaacctgcgattaatagcgcaccgccgagaacgactgtagccgctaatgctaaaaatttgttcatacaaacactctccttttcgagaaaattaaatgtaatttaataaacttatagtactaaattatttcctattccgcaactatgtattattagaagttatccataactaaaagttatagggctcattatacgtaaatgtaaaagataagccaccctaaataactccaccggccgggtctgtctccggccttcggcctccgcagggccaaagtcgtaatttaggatggcttatcttcttttttacttacctataatgagccctatagctaatagtaattggtataacatggcagcgccagcagtggtacccatggctttatctaatttgatttcatccacatgggtatagaatgttttgatggttttaaatgctgggatgatggcgagtaatgcgagtaatgctgggattgggaggactttcaaatagatccaggcaccaatccagaagaagttaaagatataggtaatgctcattaggctgatggcacggtcgcggcctaatacaattggtaatgtgcgacgaccgtgtttttcatcgtttcgaatatctcgaatgttgttggtgagcatgatggatccaactaatagagtagccggtagtgcagggattaggaatgctagtgaaagttcacgcgtccacgcaaagcctgtaatgaggacaatagcaaaacccatggcgataccggatgagatttccccaaatggtgtgcgagaaattggctttgggccacctgaatacaaaaaactaattaaaatacagatgatgccggccggaatgtaccaccatgtaatggtggctgataggtataggccgatgatgataggtacaatcataagaaccttaatcatagtggagatgagctttggcgtcactgcaccacgggtaagggaaccagcattacctattttttgccccgcatcaagaccagatttaaaatctttcaattcattccataaattagcgatgatttgagccgatacgacggctaaaaatataagaattgtatggaatatggcgagtcctgtgccatgaagtgcaccgaaggtataataactaaatgcagcacctaagatggttggccctaatgcagcagccaatgtgcgaggtctagtgagaggaattaattcttgtatcataatggtgtggcgaaatgccaactcctttctgttagaaatacgttttcttatctttaagtattgtatagtacattaggagaaatgtaaatttggtgtacctatcatgttagtacaattatatagtataatattatatgtatatttaaaattcttaatttaacttacttatataattcaattcatatattcatgaggtgagactatgaaaacgtggagtaagaaggtaatgacactagcttgcgctacctgcttaacggtaggtatggcggctgtagcttgtgccgatacaattgatttaggctatggtcagtatgctaccactaataatggtgtacacgcggtagctgtagatgcgattcctacaaatcctactttcagaacgatggaacaaaataagacccttcaaacagctaatgagcgagctgcacaatctatgaatgaccgcataaaaacatcctacccaatggtaaaagaggaatttaaaggtactgctctagatgggtatagtttgtatcaattatctggggatagtacattaggtcatcatacaggttggttgcttacatacaatgtaaataaagaggcgattaattatctagatcgtacagctactcaaattgttaacgcagcaatggctgataaacaagtgaaagcacaatcagttagcaagccttacacaaaatctaatgcagagaagtttatttcaaaaatggccacagttacacttgatcgcaagatgttagagccacaaatagcaaatttaaatgcgactatgcatcgcgatatgattaaaacaatacaacaaagtgcaatgcaagatgcatcgttgtcgcaaaagaataaagaaagtattcaagaaggtgtggatctttttaaacgagttattcctaactttacaatgggtgctacagaaatatcatttaaaccatatacatctaagtttggtgctatggccggtatgagtgtgcgcggcagcttaaaatatgatggctttgtattgcctggtagcttaactatgtatgcaatgccacaaaacgatgggcttacagtacaaatcttggctaccgaagatacgagccgagactactggtcaggacaattagaatccatgtatggattgaaaaccctaaagggaggcaataaataatgaaaccattaaaaactcttgtgctagcagcttgtttagttggtgcagttactagttttgcgggtgcaaaagatgtaaaaaccatagcaggatccatgtctgttccgaatacagttacggtagcaaccgcatctactacagattctgtggatattataaaggatttgcttatcaaggataatgcaaaaccaactacgaataaacggactcgccaaagtaatgaggatgcattatctgcgcttaactatatgggcgtttcttatgatgtatatcaattacaaggggaagataaaaccggccaaaaggacgctttgttagtagccgtagatttgaaaacagcggccaatgcattgtttgataaccctaaggctaatgcgtctgtccttcctgtattagccatactcaataatggtgagttggatccgattacagaacaactcatgttgactacggttaataatctgttgccaaaagaatctaaaacatttacattgccagataagaacgtacccggttccatctatgtaagtgctggtacaggttacagtgctgccgctggtattgttggtgaaagccaaaaacctactacaattactgtagaaaacacagaacaaatggagaaaatgaataatacaaagtatcaaacatatacggtaggttctcgtgtattagttgatgcggaaggtatcaaattcccatattatgcaaaagcggcactcgtaatgaatccacaaaagcctacattgttcttggcattgactagtgatgtacaacgtcaatattttatgccaatctttgcagatgctttcaaatctattaaataaaatatattgaaaaacatcgatattaatgtataataatttctatatgatgtatgtattgtaaaaaggagtcctattatgaaaacaattcacacagataaagcacctgcagcagtaggtccctattcccaagctaaagtagctggcggtttcttgttcgcttctggtcaggtagcgattaaccctgctacaggttccgtagttgaaggcggtatcgaagcacaaactgaacaagtatgtaaaaatattgaagctgtattagccgaagcaggttctgatttctccaaggttatcaaaacaacatgcttcttagctgatatcaatgacttcaaaccattcaacgaagtatatgcaaaatattttacatctaaaccagctcgttcttgcgtggctgtaaaagatcttccattgggcgttgcagtagaagtggaaatcatcgcggaagtataatatggattatatttcattattacaaaaagaaatgcgacctgcctttggctgtacagagccaatcgctcttgcttatgcagcagccaaggccgcatccgtattggatgagtttcccaaccacattcatgcgcgatgcagtgccaatatcattaagaacgtaaaatccgtggtcattcctaactctggaggccgcaaaggcttagccgcggctaccgtactcggtgccatcgtaggccatccagaacgagaactagaggtgttagaatcggctaccgatgaagatcgtaagtggttaggcaccttattagaggctaacttttgcactgtagaactagcagaaggcgttgataatctttacattgaaattacggccaccaccgatgaacatacggcagtggtacgcattgaaaatgcacataccaatattacctatgtgtccgtagatggaaatgtgatttctgaaaccattaacgaaattaaagaggctgaacgtagtacttgcccgatgacattcgatagtatctacgaatttgcaaaagctggtgacatttccggtatcttacctagcattaagcagcaggtagaatataatacggccatttcgaatgaagggttatccaatgattatggtgccaatattggtcgattgttattgcttgatgatgaaaccccatctctagaaacaaagtgcaaggctcgtgctgcagcaggatctgatgcacgcatgagtgggtgcccgttgcctgtagttatttgctccggctctggcaaccaaggattgaccgtttcaatgcctatcattacaaccgcggaggaactcgataaaaccgatgaggaattatatcgttcccttgtatttgccaatttgttaacgctttacgttaaatctggtatcggtaaattatcggcatactgtggtgttgtatcggctggcattgtaagtgtagctggtattgccttcttgaaaggcgatagtaaagatattatcgaagatacactcgtaaatggccttgttagcctatccggtatcgtatgtgatggggcgaaaccatcttgtgccggtaaaattgccatctccttagatggagctttcatgggctataaacaagctcgtcttaacaagagctatcaaaagggtgatggccttgtagcccactccgttgatgatacgattaaaagtatcggtgtcgtagcacaaggcatgaaagaaaccgatgtggtcattttgaatgaaatgttaaagcattaattggttttatatacggaaaacagttcgtcctataaacaagaaaacagcgttatgatcggcttggtcataacgctgtttttgccatattattgtaattttttaggatcctttagtagcaacgatgcgcctaaccccacaataaggaatgggaccagtgtcatcatggctgctgctagggaataggtatctgctaaattccctacaaccggtgcgatgatgccgccgattgtttggcttacgccaagggtgatgcctgatgcaaatccgatgctcttagctaggtatgtttggcccagtacgataacagggctgtaactaatggcctttgcagcaccaatcatgagcaaaatcagataggccagtggcatcataatcgctacagaaaactgagggacttgtgttaataggaacatggatggcaaccaaattaatagagataatctaatgatttttataggcccgtatttgtcacccaacaagcctccaatgtaggtcataaagataccgatactaaagaatacggttaatgcaaaactaccttgttcggggctcgtgccgagttcatgtgtccagaatataggaataaatgcattaataacacggaaattaaccgattggcttagaatgataatgaataatatgccaaaatatttccaataatttttcagagtcttggcagctaccgttggattttcggtggctacagcttgatcgatagtttgggcatgagccacgatacgcggcatgagcaggaatagaatggtagatataataataccggctacggtgaaagctgctagaccatgtgcacccactgtataggcgatagcgcccgcaaatagaggaccaaaggcgaagcctgaactaccgccgatggcgaaggttcccattgctttccccttcttgccacctccgaggcggttcataatttttgccccttcaggatggaaaatggaagaacctacaccggctagtgtggcacatataaggagactttcataagacgaaacaaaacccatcatccccgtactacatgcggataataacgtgcctgctgcgatgagtcgtggctgattgagcttgtctgaaatataccctagcaatggctgtagcaatgacgataatgccgtgtttgctaagataagaaaacctgcttgctccaaggacagtccatacgtatagataaacaacggcaataatgcaggtaatacactttggcatgagtcgttgatcatgtgactcagcgtgatgagataaggataatacttttgcatagtaaacctcgttgattgatgatgtaatatataatatatttatattatatactatatgtatacaaataaaacctagataacatctgtattatgtgtatctaggtttatctattatatctctatcattatcattttaaatatggcagaggaggagggatttgaacccccgcgccggttgcccgacctaccgcatttcgagtgcggacccttcagcctcttgggtactcctccgtgctttacgacgctctttaaagaaatctttcatcaattggctacattcatcagcgaggatgcctgcttgcaattgtggctcatggtttagtcccggatgggatagcacattaaacagtgattctacggcgcctcctttgtagtcgctagcaccatatacaacgcgatcaatacggctgttaataatggcccctgcgcacataggacacggctctatcgtaacatacagggtgcatccagtcaaccgccagcgctttagtctattacaggcctcacggatgacgagaacctcggcgtgagctgttgcatcatgatccagttcacggcggttatgatgacgtgaaatgacttgattatcgtggaccaaaatggcgccaataggaatttcgccaagggcatacgcttttttgccttcttcgatggcaaggctcataaagtattcgtcacgactgcgctcgtccattgtattaagttcggttgaatccattaggtcttttgtcattattgcacctcttaatgtataatatcttacatagagtctatcatattttatcgtatttttgcgaatagatttaatcgttgtgtcagttgcttgtgtgaggctagtatggatattatttggtatatgtttgatatgatcggcaccgtcgcatttgccgtatcaggcgcacttgtaggcgtgtcccgtaaaatggatattttcggcatggccgtgctcgcccttgctaccgctataggtggtggcgtaattcgtgatgtactgctaggttatttcccgccaaactcacttcgtaatgtagtgtacgttacggtcgtcctcgtggtaacctttattgtatttgctatttataacagtcgctatcatcgcaatatgatggggcctcgcagccgcgctagttacttgtttgccgatgctcttggcttagcatcctttaccgttacgggtgcctccgcaggatatacactatatccagacttgcctatatttatcgtattacttggtaccattaccgctgttggtggtggcattctgcgcgatatgttagcacagcgcgtgccttccgtactgaaagaagacgtatatgcgttgcctagtattattggcggtatagcctattatctactggtaattggtgattgggcgggccaagctgtctatggggctttcaccattgtgctggtcattcgtctactagctataaaatatcactggagcctgcctcgtgtcagataataatcggttttatgcgatatatttgccaaattatgactaagtgatataattgtaatattagttatttttttatgattgtatcccttacaacagttgtgaaatggtacgcacaagcgtgcttgataaaggagtttaacctatgtctaaaaaatggttgaaagtagcgttaatggttacggctattgctacgggtacatccattcaagttgatgcggaaactgtgttatatgttccgcaagatgatcgtccagtaagcctacaatatacagttgatactgcaaaggcagcgggaatgacggtgttaacaccaccacaaaatttgatttccggtaaaacctacaaagggcaagccgatcaaatctggaattgggtagagcaaaatgcgggtcgtgccgatgttatggtattgagtacagataccttaatctatggcggccttgtggattctcgtaagcataatttgccattgagcacattggaaaatcgtttaaaacgcatcgaagcgcttaaggcaaaccataaaaatacacgcatttatggctttggtaccgtaatgcgttccccacgcgctagtgggggtggtacagaaccatcctactatgcagattatggtccaaccatatttcaaattgctgcactacaagataaattggatgcaggcacattgacacaagcggaaacgcaaaaattgatgagcttgcaagcctctgtccctgtagaatatctacaagactggttctctcgccgtcaaaaaaatatgcaagtgaataaagacttgatcgatgaagcgcgtaatggcgtctttgcatactttgcattgggccatgatgatacgtctcaattgtctcaatccgcattggaaggacgctatttaaatcaatactccaagggcattccacgtacacaatatggcagcttccctggggcagatcaactcggtttattgttgatggctcgttctcgtaccgatgaaagtgcggaaaaacctacgttctccgttatctatccacttggtggtgccggcaaaacattgccaggttacgaagaccaaaccgttgataaaacgattgcggaacacgtagaagccgttggtggtacgatgacaactgctggtaaaccaactgttcttctcgctgttaatacaccgctttctacgagcacatccgaatctgaaacctttggtaatttcccaatgatttctcaagctacgactgcctttgtagatcgtattcaacaagctacggaacaaggtgtaaacgtgagcattgcggatattgcctataacaatggctccgataataccttgttaggtgctttatataaacgcgatttactctataaaatcggcgcttacaatggctggaatacagcaagtaatacggtaggctatgcgattgcacaaggcttattgctacaaactatgtccccagaagggcatcgcgatatgttgacccaacaatacttagataactgggcataccaagcgaatatccgcaaggatatttatcgtatgcaagattccattcgtaccgacaatgtacgctactctggtgatttgaatgcaaaattagaagagtatttacaagaacgtgtacaagatttcagtgaaacttatttgaaggtagaccctcgtaaagttaaggctacattcccatggggccgtttgtttgaaacggatattactgtttatgataaaccagtagtacctcttcaaaaagaaattcgtatgcaacgggaagcagaagcgaagagacaagctgaagcagcagctgctgctgcggctgcacaagccaatggccaagcacaagccgctccagctgtgccaactacaacaactcaagctgcaccagctgcaacttcgacaacggtagtacatcaagcatcgacttcaccgcgtatcgttccaacaccggccgctgtgccgcaacaataatcgcctatgaaacgatcgtttttgcctgaaataacttatatgcgtggcctttgtatgctcggcgttatcggcattcatgtcggctcctatgcattacaaaatccgttcgttaatttacaactcattagcgtgttggaaatcttatcgcgttttgcagtgcctgcatttttcttcctgtcagcctttggtttgttctaccatacatcggtaaacgatccatttagctacaaggattttatgaaacgacgctttcaagtggtgctctatccttacattgtgtggtccctattctaccttatctatacaggcatagcggcgcacaattttgggaatctccatcccggaccgttgcttgtgaacctcttgtttggtaacagtatgtaccatttatattttatggttatactggtatggttctatgtgctcatgccactatggcgtgtgatggtacggtggattttgaaagcccccattccttggcttgtcatcttatttgccatccaattaggtgttgattttatatcatcttatcgattgggagcctgggtgacacaacagtttagcgattctccagccataaaatatctcttcgatatgcgccttaattattgggtgattcattatgtatggatattcctctttggtgctgttgtagctgagcgatatgaaatcgtgaaggactatatgtggcgttaccgatatctattggccacatgtgccattttatcgattctatccatgttgggcgcctattactatgtcatggatgtatggcattatacggtgctcgaagcgatttacacggtacatcagttgagtccaatgggtgtattctatacggcattaggcacattgtttagcttattcctattccaagtgatgcccctcaacaatacgatggaggcgttctggtcacaaattggggatacttcatacggcatctatttggcacatccgttctggttattgatcatgaccggtatcatggccaagtataatcttctatttacagtgcctcacgtagtgctgttgtatgtgatggccgtaggattatcctacttgacgacagtaggtttaaaacaaataccaaagccaattcgaaaatatattcttggcaactaataggcttatacaagccctgtaagattggtatataactaattacaatagaatccgctcttaccataacttatagttatcggtagagggcggattttttcatgactaatttgaaaactttcacaatgtaaagtgtgaaaattaatctgtgattgtgctataatacaatcatactgattagagttacaacaagggaaaatgaggtgctcttatgaaagaattaacatattttaacggtgaattcgtcgaaccaggtgcaaaggtaatcagcattgatgaccgtggttacttattcggtgattctgtatatgaagttgtacgtgtaactaaaggtcgttgttttgcattgtcctatcaccaagaccgtctatatcgatccatgcgtgaaatggatattcctgtaaaaatgacaccagatgatttgaccgaacttcacgaaattttgattgaacaaagtgaaatcaaggaaggttacatttacttacaaatctcccgtggtgtggcgccacgtcatcatgcgtacgatcgctctaaacttgaaccacaaatgctcatgtccattcataatctcgatatggatgcagtgaacaagttggaatccggtgtgaaagctatcgcattgcctgatgaacgttggggtcatgtagacattaaaacaacgaatttggttcctaacattttggcacaaacaaaggcggaaaagaaatttgcctatacagcgatgttattccgcgatggcatttgtaccgaaggggctacatccaatgtatttgccgtaaaagatgggattatttatactcatccagcggataatcatattttgaagggcattacgcgtcaaatggttatcactcgtgtggcaccttcattgggcatcactgttatcgaaaaagagtttgaccgcgccttcgttgatgatgcggatgaactattctttaccaatacaaccggtggtgtgattccgattataaaactcgacagaaatcctgtagctgatggtaaaccaggtgcagtgactatgaaattacgtcatggtctagaaaaattaatggaagaaggcttggcttaattagcatactataggtatcaatatggtagctatagtggctggtaaggggagctttcataaagaaaggacatattttgattacattagaacacattagcaaggtctacgaaggtgctaatcgtgtagaagcgctgaaggatattagcctcaccattgaaaaggggcaaatctacggcattatcggtcaatcaggggccggtaaatctacactgattcgttgcatcaatatgctggaatcccctacatcgggctccgttatcgtagacggcacagatttaacgaaattgagtgctagtgaactgcgtaaagcgcgtaaacacattggcatgattttccaacattttaatcttttatcttcgcgcacggtctatgacaatgtagcattcccattggaattgcaagggcttagccaggctgaaatcaaggagcgcatcactccgattctcgatatcgtaggtttatcggaccgcgtgaataactatccatctcagctatccggtggtcaaaagcaacgcgttggcattgctcgtgccttagcatctaatccaaaggtattattgtgcgacgaagctacatctgcgttggatccgcaaacaacagaatccatcttggaattgttgaaggatatcaatgaacggatggggcttaccattgtgctcatcactcatgagatgaaggttatccgtgaaatatgcgaccgcgtagccgttatcgaaggcggtgttatcttagaagaaggtagcacgctcgaagtatttacaaatccgaagaaaccaactacaaaagatttcgttggctcagtagtaagcgataacctaccaaaagaagcgcttgaacatattgaacttcatgatgactggattgctggtacggcaccattggtaaaattgaagtttaccggccaagccacagatgaacctgttgtagcaggtttagtacgtcgttttgacctcgatgtaagcatcttatttggtggcatcgactacattcaaaacactagtgtaggccgtctcatcgtcattttgaatggtgatcctatgaaggcgcaagaagggctagactatatcagaacgttaccaattgaaagcgaggtgatcggttatgtcagagcaagtaattaaattgttgataaccggtaccttggatacattgcaaatgactgttatctctacgattatggccatgattattggtattccgctcggcgtagtattggtggttacatctaaaggacatattttagaaaatgcagcgcttaataagattctaggggctatcgttaatgccacacgttccattccgtttatcatcttaatggttgccatcattccgtttacacgtatggttgttggtacgtccattggtacgacggctgcttgtgtaccgttgacattggcggcgattccgtttttagcacgtcttgtagaaacatccattaaggatattcaattcggtgttatcgaagctgctcaatcgatgggggcaagtccattccaaattatccgcaaggtattgttaccagaagcattgccaactattatcgataatgttacggtgcttattgttaacttgattggttactctgcaatggcaggtgctattggtggcggtggccttggtgatattgctatccgctacggataccaacgtttccaaggggatatcatgctcgctaccatcatcattcttatcattatggttcaagttatccaaatgattggtgacggtttatccaaagcgatgaataagaaataggaggcgttatgagcgtcaatgaaaaattgagaagtgctcaacatgacgagctctttgaaggcattttacaacttcaaactgtagaagaatgttatgcattctttgaggatatttgtactgttaatgaactgaaagcattatcgcaacgacttcaagtggctaaaatgttacgcgctggtgatagctatgaaacgattgtagaagaaactggtgctagtacagcgacgattagtcgtgtgaaacgatgtcttgtatatggtgctgatggttatacagtggtattagatcgattggcagacaaaaaatagtcgtaacatattcatagtaggatataatacataacggtgaccctggtcaccgttattttgtatataggactattgtttttacttatacgaatggtaaaatgatagtatatgtatatgagatatgggaggtcgtatatggaatggctaattgcaataaccggattaccctatgaggtaatgatacttatattgcttgctgtagcaggggcctttgcgggctttgtggattccatagtgggtggcggtggattgatatctgtgccggccatgttgctaactaatttgcctcctagcgtggctctaggtagtaataaattgtctagtatctttggggccggtagtgcatcaattacatttttacgaaaccatatggttgattttaggctggttcgtaaactattgccttttacctttataggttctatgctgggtactttggcggttgtatcattaccgccgctatatgttaaaccgattatcatcgtattactcgtggccgttacattatttgtagtctttaaaaagaactggggcgaagtaaatcgcacctctcaagtaatggggcgagcactttatatttgtatggcctttgcccttggcatcggtatttatgatggctttataggccctggtacgggtacatttctcattatgggatttatctttaccggatttgattttctccatgcttcggcgaatgctaaaattttaaatttcaccagtaatttagcatctttacttgtgtttctatatttaggacacgtcaatattatgtatggtcttgctgctgcggtgggacaagttgtgggcgcctatttaggatctcatttagccattgcgaaaggatcgtccttggtgcgtgttgtattcctgtctgttacgacagtgatgttgttaaaattagtgtttgattatatttctaccttgtaggaggtgtgagtatgcctcataaaaatgatgttcaagtggcattgatcagcggtggcacatcggggattggatttgccacagctaagctattattgcaagaaggttggtgcgtcgttatcaatggccgcgatgaacaagcgggacaaagggcaaagatgaaattgcgccgatattcttcgaaggtgcgctatgtgaaaggcgatgtatccagtgttagcgattgtcagcgcatcgtaaaagaaacggtagatttctttggtagtatttcagctcttgtaacggcggctggatattatgaagaagagctactagccgatgtatctgaatcagcctttgatgaaatgtttggaacaaatgtaaaaggaactgtattcttgtgccaagcagcattgccttatttacgtcaagtaaagggcagtattgttaccgtatctagtgatgcaggtctacagggcaatgtagcctgctcagtatatggtgcgtcaaaaggtgctatcgtaagctttacaaaatcactgtcccttgagatggcgccccatgaggtacgcgttaactgcgtgtgccctggagatgtagatacatcgcttgtagataagcaaattgcccaatcccatcaagatgcggaacaagcaaaagaggagatgggccaacattatccgttaggacgtattgcaaaacctcatgaaattggcgaagttatcgcttttttaattagttcaaaagcatcctttgtaacaggtgctgcatggacgattgatggaggtcttacgagttggtagtgaatagagtgttatctattactaatagtcataataagacagtttatacagggtaaaatatatattattcatttcaattctacattgagaatggtataataatactaatgaacgatacatacattcacaagtggaatccggagaaaaaaggagaacgattatggcagaatataatggcgttagaattgaaccgcttagcgatggtggtcaagatttaaattatcaagttgaacaatttattttctggggcgcaggccgtgctgccgtattggctttgtctccaaaattcagcaatgttgcactatgcacaaatgcaacatacatggtaactcgcattgctcatttatatgatgttgaattacaaacaggtgctgttgtaggtttagtaggtggcttgagcactgctattgctacagctgctatttccttgctcgtaccttttaaagcagtacgtgtaccggtagctgttggtttgacctatgctattggtaaggtagctcatatttggatcgaagatggtatgccatccgacatcgaacgctacaaacctatgattgctgagttctatgaaaatggtaaagccattgctggcgaaatcgctcgtgatgcagcagcaagcattccgttcacgcaaggccaacgcgatgtatgggctggtattgccaatgaaacaggtcttgcaaaagaacaattagaacaagtatattctgaaaaagtagcacctgctattgaaaaatggaatacggaaacgaaataccaattgcatgataatgcagcagaagcagtagcaaaggtaactgatgcggcaaaagaaaaaatcgatgcagcaaaagaaacattggatactgcaaaagaattggctaaaggtggcgtagaagtagcgaaagcaactactcaagtggctgtggaaaacgcaaaaactacagcgactaaagctgtggaaaatgcaaaagatactgcgttccaagctgttgaaacagtaaaagaaacgacaaaatccacaattaacggttttcgtaaatagttagaaggattggtatgaatccattaaagattatcaaatatggcaagtattttagtgagtctcgattcttggcgtttgccactcgctatggtaaaaaacttgcctttgtacaaaaagcagtggtgttattcttttgcttgcgcgatcaagatacaccaaaatatgtaaaggctattttagccggcgccttagggtatctcgtcctaccaatcgatatcattcctgatacgattgcgggccttggctgggtagatgatgtagctgttctcggcattgctttcaaaatcgccaaccgctatatcaaaacatcccacgaagaacaagcgaaaaagctattcccttttggcaactaacaagtacataaaaaggcagtttaatcattgttattggttggactgcctttgtttatttgacaccctttgttaatagatatacaattaaatttgtattgtaataagaaggatgaataaatgtatacagcgacaattaacgtccgtttctatgaaaccgatatgatgggaattgctcaccatagcaatcattttcggtggtttgaaatggcgcgtattgaatttcttcgtcacatcggtgtcaccttgtgggatatgatggacgaggatatagtatttccgattatgaatgtatcgtgtaactataaggaacctgctcgattcgatgacacgattaatatagaaacctatttagtcaaaatgacccgtgctcagatggtatttaaataccgcatgcgccgcgctagcgatggtgctctattggcgacgggtgagactaagaatgcctttatgtctaaatcgtctgggaaaatcgtacgattagaggatcgcttttatcaacctattctaaatgctgttgaggagatgcctcatgactaatatagatacacaacgactgcctatcggcgtctttgactcaggtgtaggtggtctatccgttttgaaagttctacaggaacaatttcccaatgaaaacttcatctatataggggataatgctaataatcccgttggcaatcgcccaaccgaggagattacagaaatcgcttgccgtattgcagaaacattacatcaagtacctgtaaaattgatggttatcgcttgcaatactttcaccgtagtagccctcgatgaggtgcgcagtcgcgtcaatgtgccggttatcggtgtatcgcaaggtgttaaaactgctattcgtgaaagcaatagtaataccatcggtatcatggcgacggtggcgaccgttaatagtcatattcataaatatgtggctatggacatcgaccatgaggtttttgtgtgggaacaaccatgcccagaactagccggcttaattgaacaaggtcatttgcatgatgacgctgttcgtaaaaccgctaaggagtacttagcacctatgctagaacgggatatcgatgttgtcgtattgggatgtactcatttcccatttgttagccctgtcctgcaggagttatcaggtgaccgcatccgatatatcgaccctgcttatgagactagtgatctagtacgacgtacgatggacagcaatcatttgcataatccatctaccgagaagggccgtagcaccttgtatttcacaaaggatattgccctaggggctgatttgggcgcccaattcttagatactgatgatttttcggtggaattgattacactataaaggagaattcacatgtggttttatgacataataaatgtgatagttgccattgcagttattgtagctattttgtacttattattccgtctattcgtattaaaacaaggtaacgaacgcgttattttgttgtcaaagcggaaaacaagctttcaattggcagatatgaatatgagctccatgacattgttctgcgatgtgccatttgtaaacaaaggccgtcaacttggtacaatcatggatttatttccacgtcctttgcttccagaagaacattttgatggtgtgaaagtagacgcttgggctatggatatcgatcgtccacgccatgatggttactttgaagctatcatcatcaagcctcgcaagggtggtacaatccgcgtttacgttaccttaactggtagaaatggtaatattcgtgaagatattaaaggattcccttatatggacatcgacatttattaccaaatcgtaggtcgtaccgattaccatatcgataaacagcgtattcgtttgactgcagaagaagtacaagcagcattggttcactaaggaggcataacaatggcagaattagaattagtatgtgttcctacacgtattcttacagataatgatgacatcgttgatgctatcgttgaatttggtggtcacaatattggaccagaagacatcgtatgcgtagcagaatccgttgtggctattacacaaggtcgctttacacgtcctgaagaactcaatgtatgttggcaagcgcgtatgattaaccgctttatccatccagatggttccatggcttctatttatggtatgcaatctgctatgaacttagatggtaaatggaaggtattaggtgctttcttcttaggcgctattgctaaaattttccgcaaaccaggcgtgttttacgctatcgcccgtgctgcatccttaaccgatgacgtaacaggtacaatgcctccattcgataaacacatcgtatttggtccaaaagatccagataaggtggctgaaaaaatcgttcaacgcacaggttgctatggcgctgttgtagcagacgtaaatgacttgaaacgctctgcaattctcggtacaagtcgcggtattgatgcgaagaaaatcgctaaattgttgattgataatccgtttggtaatgatagccaaatgacaccaatcgttattattaaaaactacgcttccgtttcgggagcaaaataaaagattctcgatgtttccggtgcagaactggtaagtctagagattaacaaaagagactgctccggcggtctcttttctgtttaaaggaggacatatgttattaggcatagatgtaggcggcacctttacggatgccgttattatagatgggggtaccatcgtttcatcagcgaagcggcgaactacgaaggagaacctcatgaatggcataacggatgccttaggtgcggtgatgcgtggtgcggaccctgcacaaatagaacaggtaacgctatccactacggtagtgacaaatacaattgtggagcataaagaacagcctgtagatctctatgtagtagcggggccagggcgcaatgtagatgatatattccctgtaagacctgtgtatcttaaagggtatacggaccatcgtggcatcgtggtggaacgtacagatgtagaggggactcatcaactagcgaacatggtgcaatctaagagtggtaccgatttggctgctgtatctgcaaaatttggcgttcgcaatccaaaggaagaaatcgatgttgctcaggctctagctgacacatatcatacgatttctacaggcagtgcgttaagtggcaatcttaattttccacgtcgcaccatcagtgcctattttaatagcgccgtggcctctgtatttaaggaatttaagaacgctgtttaccacgcattagatacctttcacattacggcaccggtatatattttgaaagctgacggtggttcgctaccgatagatacggtggaatccattcctgtagaaactgtatttaccggaccagctgcaacggttcttggcttggaagcattgcgcagcactaaagacgctcatacggtggcccttgatattggtgggactacaacggatatttccttgtggaaacagggcaaaccactgatgacaaaagagggcgtatccattcgtgaatatccaagtgctgtacgctcctttgcggttacctcggtgggcattggcggtgaatcggcggtgcgctatgaagatggaacactcatggtcggccctgaacggattggcccatctgttgcattgggcggcactatccctacattaggggatgccctcatcgtgcttggtaacgcgcattatggcgatgaacagaaggcgtacgatgccattgcacagattgatacgaccattgatgctaacactatggctcaacgcatcgtagatgaagccgtccgcgttgtaaagcaagggattgatacggtcgtggcaaaggaaaataaacgacctatctatgtagtagccgatattgtgcatcctgatccatttgtgccggcccagcttgttatcgtcggtggcacggcggttagtttgggccctattattggggaccaactaggattgcctgttcatattccagccgatgcggccgtggctaatgccatcggtgccggtgtggctaaccatacgatggcgattacggttcacgtcgatacaaaacgtcgtactatggtagtgccagaactgggtattcaagataaaagtagctctttgcgttctgctgacgctgtcgcaaaagtagcttatggcttactgcgcgaggctgctcaggaacaaggtcttgtacctcaaggtacaatgcctgctatagaaacgattagtgttgaagattttcctgttgtcgatggatggcaatcgatggaacgcattattactgtgaaagtacaactgaaagcgggggtgagcagttatgtggaatcataaggaaagttaccgggtacgtaatggaatcgtgtcggctagcacaatagaacatccttcattaggcctcgtatttttcccggcctttgattggaaaatttctgctacccatccagaacggcaagaacggttgctctatacgcgggatcaaattgtggaagaaggattgctcgatgtgccgaatattagagaatataatcctatcgtagctgaatgggatgtgatagaacgagttcacgttggggcccctgatttacaatcgtgggtaaccgatgcacatcgcgtatcggctggtggtgccattgcagcagctgatgcggtgctacgaggtgaagtggatcgggcctttgctctcgtcagaccaccagggcatcatgcgatggctatggttcatggcatccgtggattttgtaccatcaatatcgaagccgttatgattcaacatatacgtcaaacctatggtgtgaaacgggtggccatcgtcgatacagatgtacatcatggggatggatcgcaagatgtgttctaccatgacccagatacattgtatataagctttcaccaagatggacggaccttatatccgggtaccggatttatggatgaattcggaggccctcaagccattggcgctaacatagatattccactacctcctggcacaggtgatgaaggtttattaaaggtgatgcgcgaactcgtattgccgattctacatgaatttaaaccggatatcgtcatcaattcggcgggacaggacaaccatttctcggatccattagccaatatgaatgtgaccgctaagggctacgcagaactagttgacctattgcaggcggatatagcggttctagaaggtggttattctgtacaagaggccttgccttatgtaaatacgggtatcattttatcgatggctgggttagattacagtcgcgttatcgagccaaactatgtagaacaacatcaatcggctgatgtaacgagatatattgatgatcttattttgaaatggaaggaccaatgggcacggcgtgaggaaatagcacgagatgaactcatcggccataaggatagctgggtccgtgattattctgtgtattacgacgaatctggtgtacaagaagagcgtcgtgaaacagtgcgcctctatcctgataaaattggttggcatagcatcgaatcctatggtaattatgggccctatgcaaagcaaagtgtgtacgctatgtttatcccatggcaggccgatgatgctacgcgcgaagaggctttcacagaagcacgtcgcatgaaagaacagggtggtctcaaccgctatgtagtggtggaccctatggggcagggacaagttgaaatttagcctgtcgaatgggaaccattgttcatgatataatagaataaacgagatagcgcccctcgtgtgaggggcgcttctattgtgatacatatcctataatgaacaattcagcatggtatactagacataaagggggcgttgttatgcgcagtgataatagaacagcaggtcaattgagaccgattaaaataacgagacattttacagaatatgcagaaggttctgtactcatagaatgtggtaaaacaaaggtcatttgtacagctactatcgaggaaaatgtgccgcgctggctaaaaggttccggtcaaggctgggtgactgcagagtattccttgttgccacgttctacaaaaacacgggtaagccgtgaggccgctcgaggtaaacaaacgggccgtaccgttgaaattcaacgcttaatcggtcgtgcattgcgcgctgttgtagatttaaaggctttaggcgaacgctccatcaccgtagactgcgatgttatccaagccgatggcggtacgcgtacggcgtccattacaggtgcctttgtagcccttgtggatgccatcgattatacatttggcagctttggtaaattccctattaccgatttctgtgccgctatttccgtcggcattggcccagaaggtcctattacagacctttgctatgaagaggatagcgctgccgtagtggacatgaacgtggtgcgtaccggtgcgggcaatcttatcgaggtacaaggtacgggtgaacatggcacatttagccgcgatgaacttaaccaattattagaccttgcagaatctgctactgacgaattgatggctgtgcaacgcaatgtactcggctctgtagcagacaaaattggcaaggtgtatcctgatgcaccgactcaaaccgctgaaggagaacaataatatggaacgtattgtattagcaacgggcaataaggggaaaatacgtgaatttgaacgggccttttctcatatgaatattacctgtgtgcctgtgaaagacatagtggacgttccggaaccagaggaaacgggcacaacttttatggaaaatgccatcctcaaagcgaaatattatagcgaaaaaacaggattgccgtgcttagctgatgattcggggctcactgtcgatgctcttgatggggcacctggcgtatactccgcacgctatgcaggcgttcatggcgatgatgaagcaaataatgaaaaattaatacgcgaattacaaggtaaatcggatagaacggcgcactatgtatgcgctttagctttggtgcatccgaatggtactagcgtgacggccgaagcctcttgcaatggcgaaattcaagatacgccgctaggtaccaatggatttggatatgatccatatttctttgttccccgatttggtaaaaccatggcggagctcgatatcgatacgaaggaaaccatcagccatcgtggcaaggcgttgcaacaattggtagcaaaggtgaacaaatgaaacgaataggtattattagtgatacacatggctatctggacaccattgatctcgcattagatgcaacggtggaccaagatatcgacatgtggctacacgcaggtgactacggcgacgatgcgcggtatatgcaaacgcgcaccgatgtgccggtctatgccgtgcgcggcaataatgaccgcgtgcagcccttagagcctaaggaacaattgattcccttagaagatacctatatttacatgacccatggtcatgaggtatcatattgtaaacgagcacaagaattgatacatattggcaatgctatgggggcgcgactcatcgtgtgtggacatagccattttcacgaggctaaacatataggggataccctttttgtgaatccggggagcattgcattgcctcgggatggatcgggcggtacctttgccatcgtcacctacgaagatggcgcctttgatgtagaatttgtgtataaacaggatattatatagtatatgtgtgaaagctacattttgtatgactttcacaaaaaaatagtaagtctatgcatggaaagggttatggcatatcatggatacaccagttaaagcaaagcctaaaatgaagttatatgggtttaataatctcacgaagacgttgagttttaatatttatgatatttgttatactcgtacagaggaagaaaagaagcaatatattcaatacattgatgaagtatacaatgcggaacgtttgacgaatattttgaccgaagtgagtcatattatcggtgctaacattttaaatattgcgaaacaagattacgacccacaaggggcatcggttacgattttgatttctgaagaagaaattgaaaaagaagatgtggttatgcatttggataaatcccatcttacagttcatacgtatcctgaaagccatccgcacaaggggattagtacattccgtgccgatatcgaggtgtccacatgtggtcaaatctctccgctaaaggccctcaattacttgatcaatagctttgattctgatattttgacattggactatcatgtgcgtggctttacgcgcgacgtgtcgggcaagaaaatctacatcgaccatcgtatcaactctattcaaaattacattaatgcgaaaacgcgcaatttgtacaatatgatcgatgtgaacgtgtaccaagaaaatatcttccacactaagatgatgctcaaggattttgatttggataattacttattcggcattaccgaagcggaattaagcgaacgagaaattaagcaaattaaacaccaattgcgacaagaaatgacagaaatcttctacggacgcaatttgccatctgtgaaagcctagattgtttaaaacgcttagttatttgtggacatgtaattaatgctaagaatataaattcatgattaattctaaaattttcgaaaaactatatcgaaaaatcttgtgttattgtttctgattctgtataatgaacttgtaaggggtattaataattaataccaagaaactattgtgtccgttgtcatccacaaaggagaattattatggacgtacgtgaattagcagtacaaaaaaaacgtgaattaaaaggcttcctcaccgtaggaactaaatatgaattaaaagacgctcatgatttatccgttgcttacacaccaggtgtagcagaaccatgcttgcgtattaaagacaatgaagcagaatcctttgaattaacttgccgttccaatatggttgccgttgtatccgacggtactcgtgtactcggccttggcgatatcggcgctgctgctgcattgcctgtaatggaaggtaaatccttattgtttaaaaaatttggcgatgtagactgcattccattggtagtagatactaaagatgctgatacattgatcaacactgtaaaattgttgcaaaagaactttgctggcatcaacttggaagacatttcttctcctaaatgctatgaaatcgaaaatcgtttgaaagaagaattggaaatccctgtattccatgatgaccaacacggtacagcaatcgcatgtttggccggtgtaaaaggcgctcttcgcctcgttaaaaaagatttagcaactgctaaaatcgttgttaacggtgctggtgcagctggtgcaaatatcgctcgtttgttataccttgcaggtgctcgtgatattaccgtattggtatcctcaggcgtattgcataaagattacaaacgtcttgactccttgcaatctgaattgatcgatctgcttggccttgaagaaaaacatggcaacttggctgaaaacgctaaaggcgctgacatccttcttggcgtatctgcagcaggtgctttcacaaaagaaatcttggaaaacttggctgacgacgctatcgtattcgctatggcgaaccctaacccagaagcaacatatgctgatatgaaagctgctggcgttcgcattgcaggtacaggccgttccgatgcacctaaccaaatcaataacgtagctgtattccctggtatcttccgtggtgctatcgacgttcgtgcatctaaaatcactgacgaaatgaaattggctgctgccgatgcattggcacacttgattccagacagcgaattgactgatgaaaacattatgccatccgtattcgatcctcgtgtagctcctgcagtggcaaaagcagttgctgaagtagctgtaaaacaaggtatcgcgaaaaatcctcaaatcgttgaagacggtcattacgaaggttaattttaactaaatcaaatatgattttgaacatgcatcctgcggggtgcatgtttttttacataaaattttaatgaagttataaaaaaatacttgtcagaatagtagtccgatgatataataattttcgttgcagagaggtactcacaactgagtaaaactcagcaaaagtagtggttgacatcaactaccgggtttgctataattagcaagtaattaatgacggggcatagcgcagtttggtagcgcacctggcttgggaccagggggtcgcaggttcgaatcctgctgctccgaccattttttattttgcgggtgtagctcaatggtagagccccagccttccaagctggtcgcgagggttcgattcccttcacccgctccatttttttttgccttttttagggtgaacgaaaaatgacgtcattagttgacgatacatgccacataatttatactataatagataattacatataaaggtaatccacatggttcagtagctcagttggatagagcaacggccttctaagccgtgggtcgggggttcgaatccctcctggatcaccaaagaaacgtaataaccgtaagggttttagcccttacggttattttttattattttaaaatgcactgccaggatataatgcaaggataaaaatttatccttgcatcaagtgtaaagattggaaacatagttaaagactttttctttatcttgaatcgcatgagcgtatacatttattatcatcgtagtgctatcatggcctgctagtttagcaatctctgtatagggaacattattttgtaccaaatgagatataaaagtatgccttgccacgtgactagaaagatgttttgtaaagcctagtattttaccaacattagtgaaataacgttttgtgaagttatgcttatctattggtcgtaagcctgttttgttttcagctacccatagattacctttagaggccagtttagctttcttaagtactgatatagtataggcatcattgataagaacaacacgtttactagacttggtttttggttcttttcgagccattccttgaagagtttcaccccatgatgaattgacatgcacttcggctctttcatcatctatgaattcaatttcatcccattggagtgcttgaagttcaccaattcgtaatccgcagtggaataatagtagaatacagtgttctaaatgcttacctttatagtaatcaagaaataaattagtttcagtaacggttagtgcctcttttggtcgttttggagctgttgatattggtttaatgagaaagtcataataatttactggaattaactccaaattacataactttttcaaggttaaacttaatacaatgaatgtttttcggatgttggttgtatagttatctacgaatcgttgtaacaaccctttggataactctgaaattggagttgcaccaaagaatggtttaatcctattttcagttatatcaatatacaattttcgagttgcctcttcacattttttatttgcaaagtaattaatacaaaaatcataatagctttgatttttgcttggctctgaactggagcatttttgagtagtttcaaaaaattgattttgatatactccagcatctcgatcttgaattaatatatttcgctgtgctttagctttgtctttatcatcaaagccttgcgggtaacggtattttattatattgccttcactatcacaatataatgggaaattacgaatataataacgcgtattaccacttctttgcttctcagcagagataacacctttgccttttggaattggatacattattgactcttttctcttgtcatctaagtacctgttcacgaagctattataggctacagcatagtttttcgcaataaacttttgccatgtatcgactgttaatgcgtatcgattacctagcttgtctttctcagataggtaaccttgatttttgagatgttttcggatcgtttgtggactaactttcaaaaacatacttacttcttgaagatagaggaccgtaaatgcattatttttcattttcagtcctcctctcatcatttaagttagaatttacggttcatctataggtctgctttttatagtattatttgtttcaatactatcatgtaaatttagagcgtctgctcttttggtgatatatgcaggtaaatcaatgattacaggcataattctgtcagccttttttgttgtatcaatagcatattgatgattatcatacgtatggtagcacccaataacgttattaatctcacctttgccatcttcaaaggtcattaagagtaatcctgcataaaggtattcgccatctggcaaaacaagttcgcattttttgtttaggttatttaattcttttaacatattgtgtatcctccataagggcaaggttcattgtttcaatcccattttttattgaattataaattattagattatcttgattctgcaagatatttatcagatagcctactgaatctgaagttaataaactagaagttgttttattaatgtgagaagtagtactatccgcttctagttgaatacaaggcgatggcaactccacattttgacaacctatatttatttctgttagatgggtagatgagggtataatatattttttatttgtttgtgttataccatataaccccattgattcaaggatacttgttatcaaggctttttggtcttttaacttttgtggactttgttgccagaccttattggttgatatattccttgggtgtattaatatatggatatgtggtgattgaggatgatccgtatgaatggctgttaataatggatgtccatcaaatactttaaagagaccctctacaatttccttcatatctttttggttaggggtatgctttccatacgggcataatatggcatggagaaattttctctccttatcagtattatgcatagggtgtgcattccatgattctaaagggttatcaatatcgaggtactgttcagcccatagagtgggagagcttttttgtcgattaaaaacgtattgaatcgcagcatcaacagtttttaatcgcgatgattgagctccaatcattttaaatatagaagtaagtttcgacatagctcttgtgcctcctttttttgctcaggacaagtaataagtgttttggcgataagaagaaatcttatgattcgagttagatacatctgatcgcttaataagcttttggttgatatatcatcgagaattccttgttctggcaaggtagctataaatgcacgaattacatcagaacgatttgtattagctacttggcaataggtatcaagtttgatacttaactcttcacctagattaacactgagttgtttcttaggctgatttttagaattaaccatcatgatgaacatccttagctccataatgcgtctgtatttttaaagctttactatatagatcagcccttagtccttttaatgcatccgctttccattgaataccacataaacaatgaatattccctaaattgtgggcggacatattttttcgctctctaatgacattatcaaagcaatcaaaaatacatcttcgtagcgttgctacattattctcagttagaccgttctgttggcaatacgttgaataggcctctttcaaatcagccatagggataaagaactctttagctgagccatcaatcatatcctctatgaatagtttttcactctgtgattcacatagttgagttttaaaccaacgatcacttgaatttgatacagtaaagccgttggctaacgcatggatatatgccaaagtgcaaactgtcgcaataatatccaattcattcttcaactcttcaatcaatttaggattgggctgttggggaacattattaaatcttaaaaataacattctctctacaaaggggttgatttcagtaggctttattttaggtaaagcatttcctactagtatgagttttgtttttacaggcatagaaacagaaggttgatacttttgtgttaatgttacaacttcatttcctatgatgagttttaaagtgctcatatcaactacgacattagaatcgtaatcttctgtaatatttacatgcgcaccaagtagtgcagcattttcgttatagcgaccaattaaagataggtcgagatgcgatactacagaagccggtaataatagtcgtaatattttaaggagtaaacttttacctgtattaggtttacctatgaatagtacggcttttttttgaccagtaatgggagctaaaagatagcctaatagttctagcagtctaagttgactattagtgtcgttagggaacatctcatctaataacttaccaaatcttgatttagatattttttctaatagagtttcctcctgcgttggaagaaaatctcttttaaagtttgcctcaatacggtaagtatgaaagtcatcatcagatacaggatttaactcattacaattttccaagtctaatcttccatttttaaatagtaagtatctttctgattgtttttcagagatttcgaaacgtggatcaacaagaatgtcatctagaattgattttagtgtttccgctcgaagcacattattaacattttcgctaaagatatttttacgcaaataacgttgaatatctttaccatttgaataggtatcccaaaagcaatcttcatttctgattgctagaataccatcaagaacttttaaggtattattttcatataatgcctttttgattagatgagcttttatcatctccttattgtcggtgatatcagccaaatgtatctggggattcatatgaaccctcctttctaaaaataattattacgaaccaatttgttcgtcgcagtaataatatcgtaatcataaaagtgatatgataatattaagaagtaaattgctaaatgcaaaaaaagtaagtaaattttgtggggagtattgtaactaaaaaaagccaaggttgaaattccttggcttttgtgaggcgttatatgttatttagatcggatttacaaattcttgatatgttttttgctaacgagatagctttgaaagataagctatctgaaagttataagctaatcagtatgatagaagataatcaacagttgaatagcactaaatcaaatctggctaattatgttcagactatccgtgattgggaaaaaaatatatgtatcgacggtgaaaaaaataatttcgcatttaataatattaaagagtgtatgaatgataacttatctgggaacttttttgattatttaacgttatcacagagtgtccaggaagaattgctatccttcttttgggattttattccaagagatgaacaactttttagtttaattaaggatactttattccagcctaattattctaagtacaatatagcatctctatgtgggcctaaatttagtcctaaaggtacttatgatattcattcaagtattttgttttcagctgaattacaaaaacaattggaatttttggtgctttcattagtaatcgaaaaacttttatcagatctatatcaagacgaggctaagaagtctttatatgatttaaaactgttcagaagtaaaacgttgaatggtgttggaaactttgttgacaataatgggaaatctttagatagtccatttcaagttgttttacaaaatgctgtttttggtaaatctaatggtacattaactatgtttagtacaggtggtgattttgacggcaattataaaaatattgataagatatttagtaacaccaaaaatgtttatgactcctataatgagcaaataacagctataactgaaaaagacccaagtctgaaaaaatacatagatgatttgagtgaaaaagattatccgaatttaatatttgaaaactattcgaatatgtttgtaattagcagattttatgaagatttgatttggaaatattcccgtttgattacgtctattaaaccacttcagtttactatttggatatatagggtagcattactgttaacgattgagcttccgtacccattaaataattacttatttgagttgttatggagcaatacaggcagtcttttgggtgacggtcgagctattaaagatcatgagattatagcggttataaattatttgcatcggattttatttaatactatacctgctatagatagttttgtatcaaaccacatatcctgtttagataagtctaaaaagagaaatctattgaaagtagctattgaagcgtttgataatataaaaccagttagctttaaggggttatatgataaggataaatcattaaatacgctagaagcagggttgaataagattttaggctatagtgataataatggtttcgttagtgattgtattcaaaaccatactattcttacatcactattcggtaataaatttaagcgatatattaacactaaatatcgtgatatcccattcaagtcatatcaaaaactattcaaggctagtgcgagcgattatcttgatgatactcaaaaagtggaaacctatttaagtgaatggtgtgcggatattattagcttaatacaagaggtagataatataaagctgaatgcacgtaaagaatataatgattatgagtctaagagtactgaaaatggattgtctcaacaagaaattttttggaatgaagtccttgatgaatgtaagaatattattaatatgaaattacagaagacatcaatttatgtttatatggtaaataactatccaaatgatacgtatgaggatggttataaaaatctagatattgtgaatacaatatttgatttgttttctgagtggattaattctgaaataattagcgatggtgatatagagcatttaaatagtaaagctgaactgattgaagctgacagtggtgtgttgtattgtgatactaactcaatacaacagcttttaaataagtatatcaacacaactaaagcaatgaagaactgtcttgatatattatataatcttaatgaaaagttgaacttatcatatcggaaatgtttagataattgtgataagagggaacttgcaataaagttaacttataatacagtagtaagattaattgactttctctattggcaggatgtagaagataattctcggtctaaaagatatgctgaattttattggaagtatagaaataactatgtttttactaaccaatggggctagtgagctaatggttaaactattataagtacttaattttattatattaacaccaagatacctatttatattattgaagtaataatatgggttggattgtacttactcatctctgtggcggtagtaatatactgtagaaaaaataaaaggccatgtcgtataaaacggcatggctttttggttattcatcatcagaaatcaatatgcgtaatactgtagtagctacttctactaaaacttgagtcagtatagtattcataatatcacctcctctctatgtagagtatgatgttacgctacaatctcatgttctttttggcagctcatgcataatggccgttgatatcgctgtttagaaaaactagataccttactagagatggtacttccacaatcggcacaatgcaaatcatcacttactttagtttgaggctgaataactttccttcttgtaatatcagatttaggttgggaaactgtatgtgtatttagatcgatattagtatcagcttctggatcatctcctgtagcaatacaaaaactaagcatataagcgtattttatagccgctgtttcagctttcatgattgccttatcaccgctatcttgaccagaaccaataccacttatttgtactgattcacctgtttctacatcaataatagaaatcgtaacgctaattgtagcgtgcttatcaatattaccttttgcattttgtacttctcgtaaatcaagaagagtaggggtaacagctgtaattaggcccacgcttgtgagtgcatcatttacacgttccaatacatcactactagtaacgtaagaatacccatgaaaggtattttcacctgttttttcaatgtagctacagcttttcatagcgagtgatagtttttcatataatgctgtattcgtcattttcattcctccgcttgcacaccagttcgtgctaaataataacttaagccaacagatgcatccatatgtacatcaccatcccaacgatatgtaaaatgatttaagacgtcattaattgttgacttgtcaacctcaccatattgtgaaattagatttttccataaaggatatgtcttttcgcttaaatacgcttgaatttcgagtgtatcatgtaatgtaataggggattctttaagcaatcgctgtatcagctctttgggtgtttctgtatgtcgattccagttgattgtagcgacaatgacagcttcactacaaagataacccgtaactctactattttcctcaatgagtagaagtgtaggtttactatgatttttatgtaaatctaatagtggtactggccaataggaaacaacttcaatttccatatgattttgtttttcggcacattgtaattcagatatattagattgagaaatacccaccatatacaaccattcctggttatctatagtgggtaatataaattggtacgtatattgattatctcgtgcggatgtaagctcgtctcgttgcttccatgcatcttgcaaaggggtattagaacaagttttattaaatataagatgtgggatttctgtataggctaatgagtaaagtgtagggatatgttcgtttttactatgaatgattgccaaatctgcaatgagggattgtccacgtttacatatatagcgatctagtaccttaattttattttgtattctttttaccacagatacatagagttctgtctccgtaataataataccgcagtattgtgtcataatacttcctttctactatgctgacttaacttgttttgctgcttcaatcgctttgcattgagcggatacagcacaataaccttcacattttttaccatgccaagtttcacgttggctacatttctttggcactacacctgtttctatggcttgttgtagccgttttgctttagcttctatatatcgttttaaccaatgattgctgattgggttgataggaataagatataacggctttgtaatacctcgttcagaagcaatacgtagccctgtatcacggcataaggcctgtatcaccatagacgatacggtgtaattttcttcttctaataataatctgtaatagttcaattgtaaggcccaatctaacacatgacgtactccatctgtgaataattcctttcgtgttttaggttgacctttttttactcctgtcttatacacttcaccagtttcaacatcttttttatagtaacctaatgctttcatcaatttataggaactcgtaatttttaaatcacctaacgtagtatccgtattagataacacttgcccatataaatcaaattgccctgttgtggtagtattctttaaacgctcttctgaaagcatgttaccactagtatgacgttctgtaatcgtatgcacagcagaaccatgtaaagcgtatagttgcttttgtggatctacggcatattcagtaatcttttttagatataattcgcgagtaccacttaataactcagtaacggaaggcttggtcaaattacgttctagtgaggtagctaccgctcgtaatgtaggtaaaaacatgcatctcgtaccttgtgggcatcgcaataagcattcatacatattaatttcatccccattaggacaaataaatcgtttggctggcataatcatatcctccttatacttgtccacattcactcatactatgaaattcaccatgtccgatgatgatgtggtctagtactggaatatcaaatagtctacccgcttcagcaactcgtttagtacaacgaatatctaattcacttggatgagaatcgcctgaagggtggttatgaacaatgacaatcccacaggcttttaaacgaactgccgaagagaaaatacatttaatatctagagaggctgtcgttacatcaccaatagagatatcttcagatttaattaaattatttctggcattaagatatagcactcgtacatgttcggtttcaaagtactgcatatctgacatggccttatatatatcaattggtctacctacattaataggggctttacgaggcctattttgtacattcttaatgatagatttaatagcacgtagcttggcaatacctcgattgcccataccaggtgcatcataccactcagattcttctgcatggaataacgcatcatatggatctccataacgttctactaactcttgaacggatgcttttggcaaaatttctgttaacatagcttcaactgtagtattcataatagattctccttgtatagaaataaattatttagattcataactggaaatttgacaccaattattagtatttaacgatttaatatgacgattgattttagagcgaatcgctttaataccatcaaagatatcaatatgtagcgaaggaaatgtcgccactaaaaatcgctgtagagtagttaggttaagaaaatagttaatatcataggtttcatcaatgtataattcaatcttgaatcgaattggtaagtacacatgtgatgtatctgtattaatataggtcagttcagagcgttcttctgatacgtaatgtaatttaacatcaggggataaatacactctacaatattccatatcaatagggtgtgtattgccttcgctttctgtatgaatacgtaaaatatattcctttgtttgattatgctgatagagatcataatcaagaatgctatgttttcggctgtccgaaagcatattggctaacatacccatacgaataagaggaacatctaaacgttcaatcttttctctaaaagcccattgtaatgatttcagtaatggctgtaatgctaactgttgcttactgataaacagaaatgtgttttggtaatatttgttcatacaaatcctcccataaaaaatacccctaggtgtcaatgcacctaggggttaaccttaaggaatagctatatatactatcataatgatagtatataaataaaaaaatagaatatagctgtttatgaaaataagatgaaaattttaaagaggttttattattttcaggtataatcactagtataaaatggtggaggacaaggcgtatgttggttaattcaaaaaatataaagatatttagttgtatagttattttgctttttttggtaacaattggtttgttgtggaaatatgatttaatttttacaaataaaaaaactattggagctaaagaacctacaaatataacaactatagtagacaataataaagataaagccacagctgataaagagaagccaatagaaaaagtttcgttagtaaatgatattgatactacaaaagtaaaatatgcggatgttcctaaaagtcgtccaactaaagaagatatggaacgacgggagcgattagaagctacacaacgttataagagtggtcaatatggtgttgtagttgatacatcaagcataagatctaaaagtgcttggaatacggaagtaagaggacaagctataacggttgtagctgatgcaactattaatggtaattacaaatcaataattttgttcattgttgtatcgggtgattctgaaggtatggttcttggtggatatgatacagataatagtcctcaagtgattaatattatgcgggtgaatggaccgttgtctagtattgcaaaaataactatagatgcaatggtagataacggagcactagatcagttctctaaagttaaaattgacaattttgcttattacaagctacctaaataagtaatgagatgggtataagtattttttagttttgtctgttgtagtgactaagatttattattttagcgggcatcaatagacggggaggaatttatggaagagaataaattaacgttaaaagagaaaattagcaaaaacttagaaggcactactggtaatgcatttgaaaaatctacaatcgtttttggtactattagcgagcattatttcaagaataaatggattggatatattattggttttctaatcgcggttgctgtagttggtggagtaaacagtgcggtacatggactttacaatgtaattgcaggtccatctgaacctaaattttataaagatgtgggggcatatgagattattaatgaaatgattgaaggggttcaaccacctcgaaaaaatgagaaactaattgatttctttaaacagaataaaggtgttagaatttatggtacggtagcaggtgtaaagattgatggtaatactcctgtagttacaattgttccctttttaaaatatgacagtactaatgatcatcaatctcgtatggcacagaaaggaatcgctatccaagctgaaaataaagaaactattgaagctatgaaaaagctacgtcgaggtgactttgtgtatattagctctacatatttaggctttaatgatgatgatgatgattacattcattttgctggatttaaagttgaaaaagaagctactccaaattttaaatagttatttattagcttacgataatatattagtgtaaaaaatgattaaagcatttgatgtcttgtaaaaaaataacgaaatatacttttaggctattgtacgcaggtagtatatcaattgactgaagatggatggctttaagtatataaagaagacgccctaaatatatactaaagattgtgaaaataactttttatccaataaaggtaggtaactggtggtgaatatctccatatattgatttaagtttattctcttttttataaaactatttattttaatattgatttttagtagttttatgacataaaagtaacttatattataaaggaggtattgtagatgcttataaatcaagaaaatgatatattatccgtagatgatttatgtgaagtattacggattggtaaaaatactgcatacaagttaatcaattcaggtaaattaaaatgttaccgtattaatagaacatggaagattccaagacaaagtgtagaagaatatatagatgaagctagaaatagttattttattgcataatttatcccctagggccactggctctaggggatgttttgactatgttggtatgatatactgattatatatttcataatctttgggggagctatatgatacagatacaactaaaacaatttcaacaaaatgctattgataagatcttggaacaatttgaagaccctaatggaacacagaaaatgttggttaaagcaccaacaggtagtggtaagacaataactcttattggtctgatagaacgtatggtaatgaattattttggcgactatgtattttgttggttgacaccgggtaagggggagcttgaggagcagtctgaagagaagatgcgtcgctttgctccatctttaagtactggaaatataaatgatattttaacatcaggttttaactctaatactacctactttattaattgggagtcgattacaaaaaaggataatcgtgcgataaaagcaagcgaaagaaaaaatttgtatgcacaaatttcctcggcacattcaaaagggttaaaatttgtcgttttaattgatgaagagcatcagaataatacgacaaaagctagagatattattgatgcaatgaaccctgttcgtgaaatacgagtttctgctacacccgatttacgaaagaaagttgatcattatgtaattcctgaatctgttgtcatttcagagcaacttataacaaaggctttgtacattaataaagatttaaataagacattcctaagagatgagagtgatgaaattgcattacttattagtagagctgatgaggtgagaaagcagatttctagagcatatcagaatataggtgaagatattaatccactagtgctaattcaatttccgagtctaagtgataaaactattagtcatgtagagcgtatccttgaaagtaaaggatatacatatgataaccggatggttgcaagttggtttagtattgagaataaagcagataaggatatgaattctaaaaagttgggtaaaattaatattggcaatgttgatgactctgatagtattacgcatcataatgctaaaccttgttttctactctttaaacaggctttatcaacggggtgggactgccctagggcaaaagttttagttaaattacgagataatatgaatgaaacttttgagattcaaactctaggtcgattaagaagaatgcctaaagctattcattatggcgttgatattttagattgtgcttatctttatacgttagatgagaagtataaagaagctgttattaatgatggtagcggatatgaagtaaaacgtgtattcctaaagccaaaagcaaagtctattaaattctataaagaatatattgatagtaaccataataatgtagacatgaaaaaagctcgcaggcaattatatgagttcttcatcgatcgatttaatcttaatacactaattaaaaatccatcaggggaaagttttaatagaaatcagttagaggcacatggtttcgtgtttggaacaaaactagagagaggttatttggttgctagactgcgaacattagatgagtttagtactgttagtaataatagtcctatgcaatttgaagtgaatactcatagtcatggtttgctattgaggcatgaaattggtcgattttctaaggttttaggtcttgattatgataatacacgtactttaattagaacgttatttatgtcaggtcgagcttcgggtacatctttagcatataaattattaccacttcaaatccgagagtattacgcttttattataaataataaagatttaatctataatacgttcgtagattttgaacgcaatagtcaatcgctaaccaaactgccgcagcaaggacaactttatataccgattaaagaaaaaatttcatctattttatcagaagaggtttatcctatagatccaagaggtcaaattattaactttgttaaaaatgtatatgatgattatgattcttctatggttgatggttttagatctacatctgaaaagttgttcgaaaaatattgtgaatccttggaaaatattaaatttgtatacaaaaatggtgataaaggagtaaactatctttctattgtttatcagatggtttttgggaaagcccgtagtttttatcctgattatttagtccagatgaatgatggtactatttggattattgaaactaagggtggtgaaactaaatcgggagaagataaaaatattgatatcgaggctcgccataaatttgaggcgttagttgcatattctaaaaaatataatttaaaatatggctttgtacgagataaaaactctgatttatatattaatacttctgaatattgggtggatgatttaactgatatatctgtgtggaaacgaattgaaacaattttgaaatagaggtattgtatgacgaatttatcacaaaaaagacgattacgaatgctttcatttttagaagtattacgcaaaaataatcaagatgatgtatcgagccttcgagcgattaatgagattgagcaaaccttaaaggaaaagaaatatggattggtatgggaagagcatactgaacacgttgatactttggtaagcgacaatattcttatatttaatgatgtaacttctaagacgattaggaggaatgcaagtgaggcatataactttctattggaaggcgataatttacactctttaaaattattagaaaaaacgcataggggaaagattgatattatatatattgatccaccttataatcgtgggaaaaatgattttatttatgacgataattatattgtgaaggaagacggatatcgacacagtaaatggcttagttttatgcataaacggctatctattgcgtataacttgttaaaaaaagatggccttatatttgtttccattgatgataatgagagtgcacaattgaggttgttaatggatgaagtctttggtgtagagaactttattaactgttttgtatggaagcgaaattctagtgtaaaaactgaaaaggataaatttactgtaaattctgaatatattttattgtattcaaaatctagagtattcacattaggaaatgcatgtaagccattagccgaagcatctcaaaagctatttaaatatgatgatggtgatggacgtggtaaataccaaactgttagtttacaaaaacctagagatccggggcctgaaacaacctatgattatattgataattcaggtaaaatttggccttgccctgcaaagggttggagaatgaaatatgataaactaaaggctttagagaatgataatcggctcatctttacggggaaaactttgagggtcaaagattattggaatgagcgtagtttcgaagggaaaaggctggatacactctggactgatttacctgagaactcaacgggtagtagtgaattggaacgtgctataggtaaacaaaatacttttgagaatcctaaacctacaaaattgatttctagatgtttagaaatttctcataagaatgccttggtactagatttttttgcaggatcaggtacaactgggcacgcagtacagttattaaatcagattgatggtggtaatcgaagatatatcctttgtactaataatgagaataatatttgtgaagaagttacttatcaacgattattaaaaattcaggatgatttgcctcataatcttaagtactttaggactggattgatgaaaaaaaatgaagatataccattgacatatgaactattagagcatattagacctttagttgaattagaatatgcgtgcgatattgatgaggcgtctattggaatcttcttaactgaagatgatttcgaccagtttatggaagaggaagaagagattgcattaacaaaagtattcttagcctctgatatactgttatcatccgaacaattgcaaagactgaataacgtggggtgtgagattatccgaattccagaatattattatagggatgaattaattgaaactggtgatatataaaaatttattacctacttactatatataaaaaggaaggggcttcgcccttcctttttatatatatgttgtaggattaaaaatgattcatatacgttatattagtttatatattattggaattttggaacattggaattctattaatgaaataaaatggtgaacagatactccgtgcaagtataaaaaataacgtaattatgcttgcatatatacttgcaaacatatataaatactagtgaacctagatgaacactgactttgcctacacacttctaagccgtgggtcgggggttcgaatccctcctggatcaccaaagaaataagcggatagctcgtaatgagctatccgcttttgcattgctattttaaattagaacaggcctgtactaatttgaagggtcctatgtataggtcttgttagaaatagaacaggcgtgtactaatttgtaggcccctatatatgtaccttgttagaaatagaacaggcgtgtactaatttgaaggaccctatatatgtgccttgttagaaatagaacaggcgtgtactaatttgtaggcccctatgtatgtgccttgttaggaatagaacaggcgtgtactaatttgtagaaccctatatatgtaccttattagaaatagaacaggcctgttctatttctcaggacccttatataggtgacctattggaaatactacacgcctgttctaatttatagaaccctatgtatctctgttaaattattaattcgcatctatctctacggtattcttctgtaaccattgcaccagttctgtatttgtcatattaccggcggcaatatcgataatcatgttttctacgtcttgttgtgttgccataatatcgaatccattaataattaaatatacatacatgctatgcaatgctgttcgtttgtttccatctgtaaaaggatgattgttggctaagccataacataattgtgctgctttgtcgtagatggatgggtataaatcgttttccataaaggtttgaaagggcgtattgacggctgacgctaataggttttcatcgcgtacgcctgatgaaaggacgaatgcattttctaattgggtgtggagttcgtagatatcttgtaccgtaaattgaatcttatgtgtactcatttgttctccaatgctttgtaaagttcataattccgttttagtacttgctgggaaatgtctctaatacgcttggctagttctttatttttagcgcttgtcatgatagaggtatcgtggagtgcggtagaatcggtatgcgttgaaggattttgtgccatagtttgacctcctttgatatattttgactttgtcttccattgatatattttgacctttatttctattatataggtaataaatcaatataaacaatagaatttctaataaaacaagcaaaaaataaaaatagaaaacctcttgcaaacctagtatttatctgcattttcactaattaaattatatttgtcaaaataaaagtcaaaaaaagtcaaaaattcttaatttgacctattgactttttgacttaattagattattataatgacataaggttgaagaaacctagaaataaagcaagaaattagatagacataaaaggtcaaatagatatacttgtagtgaaaaagtgaggtaatttatatgaacaacaacttcaataactttggcagcgattttggtagcatgaatgatttgttcaatcaattgatgggtaacatgggtggttattccacagaaaaccgtcgttataaaataaatggtcgtgaagtaactcctgaagagtttgcttattatcgtcaaacaggtcatttgcctactaatgaagaaatacaagcagcacaagctgcagctcaacaaggcaaaatgaaaaaggatggtatccttgctcgtttaggtacgaacttaacagacgaagctcgtaatggtaagcttgatcctgttatcggtcgtaacaaagaaattcaagaaactgctgaaatcttagcacgtcgtacaaaaaacaacccagttctagtcggcgatgctggtgttggtaaaacagctgtagtagaaggcttggcacaagccattgtaaatggcgatgttccagcagcgattaaaaataaagaaatcatttccatcgatatttccggtttggaagctggtactcaataccgtggttccttcgaagaaaatatccaaaaccttatcaaagaggttaaggctgctggtaatatcatcttgttcttcgacgaaatccatcaaatcttgggcgctggttccacaggtgatggtcaaggctctaaaggcttggcagatattttaaaacctgctttgtcccgtggtgaaatgactgttatcggtgctactacacaagatgaataccgtaatacaatcatgaaaaacgcagcacttgcgcgtcgtttcaatgaagtaaaagtcaatgccccatctgcagaagatactttcaaaattctacaaggcattcgtccattatacgaagcgcatcataacattgaattgccagatgccgttttgaaagccgctgtagattattccgtacaatacattcctcaacgtagcttgccagataaagccattgacttgattgatgtaacagcagctcacttggcatctcaacatcctgtaactgatattaaaacattagaagcagatattgcagatgctaaagcaaaacaagaagagtttgctcaaaaagaagattacgaatctgctattaacgaaaagatgcgtattcaaaaattacaagaagaaatcgacaagcatactgataatcaaaaagttgtggctaaggttaacgatgtagccgaagcggtagaacgtatgactggtatccctgtttctcaaatgggtgcatccgatattgaacgtttgaaagatatgaaatctcgtttacaagctcatgttatcggtcaagataaagcagtagaagctgtttctaaagctatccgtcgtaaccgtgcaggatttgacgaaggtaaccgtccaatcggtagcttcttattcgtaggtcctactggtgttggtaaaacagaattggctaaacaattagcacttgatatgttcggtaacaaggacgctatcatccgcttggatatgtccgaatacaatgaccgcacagcggtttccaaattgattggtgctacagctggttatgttggttacgaagataactccaatacattgactgaacgcgttcgtcgtaatccatattccatcgtattgttcgatgaaatcgaaaaagcagaccctcaagttattacattacttcttcaagtattggacgatggtcgcttaacagatggtcaaggtaacacagtaaacttcaagaatactgttatcattgctacatccaatgcaggtttcggttatggcagtgacaatgatgatgaaaacaaagtcgatgtaatggaccgcattgctccattcttccgtcctgaattcttgaaccgtttcaatgctgttatcgaattcaatcaattgagcaaagaagatttgaagaaaatcgttgatttgatgctcgaccaagttaacaaaactttggctaaaaaacaaattaccttagatgtaactgacgcagctaaagatttgttgatggaacaaggttatgacaaaacaatgggcgctcgtccattacgtcgtgttattgaatctgaaattcgtgacaatgtaactgattactacttggatcacatcgatgcgaaacacttattggctgatgttgtagatggtcacatcgtgattagcgacaaggatgctgctaacacatccgatgctaaatccgatgatgacaaatctgcagaccacagcaaacaagctgatgatgctgcatccaaggacaataaataatcggtaggctattgaccctttcattgaatcccttacaactctctccatatacacacatataacaatagtcctattgattgtgaaagcactcgacattacgtcgagtgcttttttgcgttattatatgaattttgtatacatgacaaaaatcattgataacgtatcaatatattttgtataatcatgttactatattctatagaatttaaaaaagagatgaagatataagggacattagaatataaggaaaaccaagcatataagaaagatgaagaacgagaggagcatagtgatgtcacattatatagatttaaatagcgatttaggtgaaagctttggcaattacacattaggcatggatagtgaggtgttaaatcacgtcactagtgccaatgtggcttgtggttggcatgccggggatcctctcatcatggaggccactgttaagatgtgcaaggagaagggcgtagctgtaggggcccatccgggatatcctgatttgatgggctttggacgccgtaggatggcggtgagtcctgatgaggcacgggcgtatatgatctaccaactcggtgcgttgcaaggattttgcaatcagtacgatgtagagttgcagcatatgaaattgcatggtgccttttacaatatggcgtgtgtaacgccggaattagctgatgcggtattagatggtttacaagcggtgaatcccaatgttcgagccatggtgctcagtggtagttatatagccaaagaggcggagcgacgaggtatccctgtcatccaagaggtttttgcagaccgagggtatacagaagaaggcaccttggtaccccgtacggaagagggggctttcataaaagatccgcaagaggccttggaacgggtgctcatgatggtgcaagaaggcaaggttgtaacgaatacgggtaaaacaatcgatattgcagccgattccgtatgcgttcatggcgataatccaaaagcgatagctttcacaaagtatattcgtgaaggcctcactaaggcaggtgtcgtggtagcgaattttcagaatcgatagattacaatcgattgtataagaatagatagaatcagaatagataaaaggagtcagtatgaaaccgattacaggaaaagcgagtttatctgtcctcttaggggcagcatttttgatggccacgtcatccattggaccaggatttatgttacaaacggcggcgtttacaggccagttacaggcggattttgcgttcgccattgtggtgtccgttattttctctatcattgcacagctcaatgtgtggaccatcatcggcatatcccaaatgcggggccaagatattgcgaataaggtcttgcccggccttggttacttcgtagcattcttgatttcccttgggggccttgcgtttaatatcggcaacattggcggtgcatccatggggcttaacatcgtgttcggcatcgatacgacgacggcagcagccatcagtggtattttggggattttattatttgcatcccctaaaatgggtggcgttctcgataacacggcgaaggtattgggcacagtgatgctcgtactcatcggttatgtagcgttttccacaaatcctcctgtagcagaggctgcaacccatgccatcgtgccaaccaattacccttggctagctacgattacccttatcggcggtaccgtaggtgggtacattacattctccggcggccatcgcttgattgatgcgggcattacaggccgtgaacatttaaaagatgtgcgtcgcgctgccttcatgggcatgtctgtagacgccattgttcgtatcttgttattcttagccgtactcggcgtagtatccatgggctttgcattagatccaaaggacccagcaggttctgcgttcttacttggtgctggtgaaatcggtcataaattattcggtattgtattcttctgcgctgcgttgacctccgttgtgggcgctgcctatacatcggtatccttccttaaaaccttgttcaaggtggtggaacggtatgaaaaattgaccatcatggcattcatcttcgtgtccacatgcattcttatctttatcggcaaaccggctacgctgttaatcgtggcgggttctgtgaatggtttgatcttgcctgttaccttagccgttatgctattggcaacgcgtaagacgaatatcgtaggggactataagcacaatccggttctattctacaccggttggattgttgtgcttgtgactgcttatatcggtgttacatccttgcaaggtattgcaaaattattaggttagggggcacgtatgaatcccacaatttctccggttggggatagtgctatctccatcgaattcggtcaagttattgaccctaagattaatcagcgtatccgtcagactgtggcgggtattgaaagcctccatttagaggggattattgagatggtgcctacctattgtgcgcttctcattcagtatgatgcgctgcgctacacctatgctgaactgtgccacattcttgaacctatttgtacgcagcatgtgagtgctgatgaaaatgaactcgtgacggtcgtagaaataccaaccgtctatggtggtgaatttggcccagaccttggatttgtagcctctcataatcacttaacagagaccgacgtggtgagcattcatagcggcacagattatcttgtgtatatgatgggctttattccaggctttacgtatctaggtggcatggatccacgcatcgctacgcctcgcctgtcctcgcctcgcacgcatattccggcaggatctgtaggtatcgcgggtgagcagaccggcacctatccatcggattcccctggaggatggcagattataggacgcacgcctctgtccatgtacgatgcttctcgtgaagaggcggcccttctcaaggcgggcgactatgtgcgctatgttcctattgatgaaagtgagttccactgtattaagaaattgggctcctcttttaagcccgttgtacatcatgtaaaggtaggcgacctccgtggcggtaagtgaatataagaatgcgtcctttgaggtggttgcgcctggtatgatgaccaccgtacaagacggagggcgcgtaggctttcaacaatatggtatgcctgtggcgggccctatggatggtgaaagctatgctatcggccaagccctcgtagggaatgcgaagcccgtaggggccttggagtgcaccgtgctcagccctacgctaaaggtgaaaggcacatgcattgttgctttcacaggcgctgacatgcagccaaccattaataatgtggaggtgccgcggtacattccctttgtttgtcatgacggcgatgtcatctctggcagctttagccaatgtggggtgcgcatgtatatttccttcgccggcggcatcgatgtgcctgaaatcaacggcagtgtagcgacgcatacaaaggcgaatattggtggatttgagggccgtcccttagcagcgggcgatgaagtgcgtttgaaggactgcgcgcgtgatactattatctgcgactatactagagaatcaaatcatttatttaatacggttctatttaatcggggcggccgtgaatgccacgaaccactacgcgttgtactgggttcacaagcaacgtactttacagaaacaggtattcgcaattttagcagtgaactctatacattgaccatccaatgcgaccgaatgggctttcggttagatggggcacctgttgaacacatcgacggcgccgatattatctctgatggcgctgtatttggatctatccaagtaccatcggatggtaatcctattgttttaatggcggatcgccaaacaacggggggctatacaaaaatcggcaccgttattaccgccgatttgcctagattgagccaattgcctattggagatggaattgcctttgatattgtatctgtggaagaggcacaagagatgtatagggcatatatgcaaaatttgcatagcaaaattcggctagcttttgcacaaagtacatttgtattttctctaaaaacaataatataatatgtaaaaaacgactgatttataagtttacacataattttgtatgtatatgtattttatgaaagccactccttgtaatagggagtggcttttttgcatataaagtataaatcaacattaaataatttatcgtattgcttaaaaatatatcgatacattttcttaatcaaaaatcatctataaaaaatgagaataaaatgaaccaatttggtatagcttaagttgtgtaaaatcaataacggattgataatgagaatggaagaaatgctacatatgatgaaaatacatacaatatgaattaaaatacatatagaattcatatatagtgtagtgaatacaagcaaagtataaaaatagacaaaattcgaaataggaattaaatattcttaatccgtataatttgcaattgagaaatatgaggagagtgtgatagaataatgaaatcaaattcatagttttttagaagttaatgggttttattgctctagaaagagctagacttcattatgtttttgaaaatatatttcatgtagttgagaggttagttagtgaaaaggaagcgaaaatgaataaaatttttaaagttatttggtccaagtccaaacaatgctacgtagtcgtatctgaaatggcgaaaaacacgacaggtaaaaagaaaatcgttgtagctggtattttggcgtctttaatgatgcagccattggcgacgatggatgttgatgcaagtgcatcatttggttactcaaataaaaaaggttctatttctattaatggtcatagtactagcaatgcaactgctagcgaagagaatgcgattgccatcggacaaaactcaaatgcatctggtagaggtggtatttctttaggtaatgatacctcagctgcttggaatgcctttgcaggtggttggaatgcaaaggcgactgggaaaggtgctgttgcattaggtcaagctacagctaacagtgaaagtgcaattgctcttggtacagatacatctgctactgctaatagtgctactgcaattggtaacggtgcaaatgcaagtaaatctgatgcaattgcagttggtacaagtgcagcagcttctgaaagtaattctattgcattaggtaagaacactcaagctaagactagccaagctattgctgttggtgaaggtgcaactgctgatggcactgcaactattgcaattggtgctggtaacagtgccactggttggggtgcaactgcaattggtaaaaatgtacaagttacaaaagaaagatctactggtctgggctgggacttaactgttgatcaatccgctgctactttagtaggttataattctcaagtacatgccaaccaaggtacaggtcttggttctactattaatatcacaagtgctgcacaatatggtactggtattggttaccaagtagatgtatctggtaaaaatgcggtagctattggttccagtggtgatactggtacacatactactgcaagtgctacggatgctgtatctattggtacagctacagttgcttctggtgaagccgctacagcaattggtaaacaagcagccgcaagtggatctgatgcagtgtccataggtacatcatcgaaagccactggttcagattctcttgcattagggaagaatgcgaatgcaagcaatagtgattctattgccattggccaagattcagtagctgattcaattaatggtgtagcattaggtaaaacaagtaaggctacagggtcatctgcaacagcattaggcccacaaagtactgcttcaggtacatattctactgctattgggatgaattccgttgcaaacaaagagtatgctatagcgattggtggtagttcgcaagctactgtagagagaggtgttgcgctaggtacatattctattgctgatacagcttcgggtgtatctggatatgatgctaatacaaatcgtacaaataaatatgctgggttaacgggaaaagcgttgacaagtacttggggtgctgtttctattggtgatagcactaatacacgtcaaattacaggccttgcagctggtacaaaggatacagatgctgttaacgtagctcaacttaagagtgttaatttagcttttactggcgataatagttccagtggagatgttaatttagcaaatagtaagctagctattactggagatacaacatatataactacaactgcagcgagccaaggtatcgctattaaaggtgttaaaaaagatattactgtatcaaatggtactgcaagtgcaagcgctggtatggctgatgctaaaaatgtagcggaagcaattaaccaagcaaatgcggatcaaaaaattacttacaaagctaatagtggtacaacgaatagtgttaaattatctgatggacttaattttactaatggtacatctacagtagcaacagtaggaaataatggccaagttacttatgatttaaatgcagctactaaaaaatctattgctgattctgaaacagctgtaaaacgtactatttcattaggtgcggatagtggtactcgttctagtcaatcattaaacgataacaatgtagattttaatgttaagggatctagtggatcttatattactacctctatggctggtaatacggttactattaatactacaaaaggtacaattcaaagtgatgcatcaggaacggcgtctctatctggtgctgatggattggcaacggctcaaaatgttgctacagctattaatcaagctaaagaaggttctgcatggaatttagcggttaattcaggagcagctcaaaaagtttcaggtggtaataaggttacattcaaagatggtaaaaatatcagccttacacaaacaggtacaactattactgtgggtacgactgatcagcttacagctgataatgtaactgttggtactggggctaatcagattgttttaaatggtacaactggtgaggtttctggtaaaagtatcaaggctggcaataccattatgaatacaagtggtttgactatttctggtggaccatctgtaacatctactggcattaatgctggtaataaagttatttctggcgtgagccaagctgtagctggtactgatgcggttaataaaaatcaaatggatgcagcagttaaggctgttgctgattccactagtgaattagggaaaaatacaattacattagctactcaatctggttctactactggtcaaactttaaactcagcgactggtattaagttctatattaatggtgaaagtggtagtgatgctttaattagtacatcagctagtggtacgaatgtatctgtagcagccacacaaaaactaaaagatgctgttactcaagcggctaatgcagcgaataaggatttatctaatttatcaacagctggtgatacacatatcaaaggtcttgctaaaactgcggctacatggaatgtgtctactaatggtagtaataatactgctgtagcaggtggagaaactgtaaacttcattaacggtgataatatcgctattacaaatacaggtcgtaatattaccattggtactgcgaaaaacgtatccttcgacaaagtaactgttggtggtgttaccattgataaaacagatggtattaatgcaggtggtaaggctattagtaatgtaggcactggtcgtgtatctaacagcagtacagatgatggtaatgttgctaacattggtgatgttaaggcaatcgctaatgatgctgtatctaatttgtctacaagtcttggagttacagatggtacgaatagtggtactgttaacttaaagaaccaaagtttaaaagttgttggtacaggtgttgcaaaagcaactgtgaatggtcaaacaattacagttgatgtagcaaaaggtacattgacaaataatacgacaactggtgctttaattggaactgctggtgttgttgatgctaatgatatggttacggctgttaatacagcgattacaaaagctgtagatactgctactggcacacaaaaacttgatgtttccgcaggtggtacagatagttctgttaaccttaaaactcaaaaattaacggtagcaggtacaggtgctgcgacagcgtctttgaataatcaaacgattactgttgatgtagcacaaggtacatttactaataagtccgatggtacaactagtgctacagctggtgtagctaaggcgactgatgtagcggctgctattaataatgcaaataccgtattaagtcaaaaaattactgatgcaacaggcacattaggtaataatacatttacattaaaagcagattctacagatacaacggctcaagcacttaataagtctggtggcttagcatttaaagtagcaggggatggtgacttagtatccacaagtgctactacggatactgtaaatgtaactgttaaaaaaggtacattatctacaaatacagatgggacaattaataaaactgcagatggcgtagtaacagcagataacatgaagactgttgtgaatgatgcgattacaaaagctgttacatctgctaaagatggttctgcatggaatatttctactaatggtggtacagctacaaaagtatctggtggtaatacggttgatctcattaatggtgacaacatcgagattacacaagatggtacaggtaagaagattacggttaagacgaaaaaagatcttacattagattctgtaactgcagccaatactgtaaaagtaggttctggtattaaccttattaccttggatggtacgactggagccgttagtggtaatacatttgcaggtaactccttttcagcaggtacttccgtattaaatacaacagggttccatattacaggtggtccatctgtaacggctgctggcatcgatgctggtaataaacaaattacgaacctagcaagtggtggtactatagccacaaatgcagctactattggtgatgtaaatgataaagttacacaagaaatcaataatttaactactaatttgactaagaacacaagtattagttacacagcaaacaacgatactccagttaaaactgtatccttaaaagatggtttcaaattcactaatggtacattaacaactgcagaagtagcagctggtggtgttgtgaagttccatgtaacacaaggttcattatctacggataccaatggtactgtatctgctggcacaactggcgtggcaacaacgagtgatgtagcaagtgctgttaatagtgcggtgactgcggctgttaccaatgcgacaggaaatcaaaaattagatatctccgcaggtggtacagatagttctgtaaatcttaaaacacaaaaattaacggtaactggtacaggtgctgcgacagcgtctttgaataatcaaacgattactgttgatgtagcagaaggtacattcactaataagtcagatggtacaactacagctacagctggtgtagctaaagccgctgatgtagccacagcaattaataatgctaatacagcattaagtcaaaaaattactgatgcaacgggcacattaggtaataatacatttacattaaaagcagattctacagatacaacggcccaagcacttaataagtctggtggcttagcatttaaagtagcaggggatggtgacttagtatccacaagtgctactacggatactgtaaatgtaactgttaaaaaaggtacattatctacaaatacagatgggacaattaataaaactgcagatggcgtagtaacagcagataacatgaagactgttgtgaatgatgcgattacaaaagctgttacatctgctaaagatggttctgcatggaatatttctactaatggtggtacagctacaaaagtatctggtcgtaatacggttgatctcattaatggtgacaacatcgagattacacaagatggtacaggtaagaagattacggttaagacgaaaaaagatcttacattagattctgtaactgcagccaatactgtaaaagtaggttctggtactaaccttattaccttggatggtacgactggagccgttagtggtaatacatttacaggtaactccttttcagcaggtacttccgtattaaatacaacagggttccatattacaggtggtccatctgtaacggctgctggcatcgatgctggtaataaaccaattaccaatgttgctagtggtggtacaacccgttctaatgcggctaccgtaggtgatgtaaatgataaagttacacaagaaatcaataatttaactactaatttgactaagaacacaagtattagttacacagcaaacaacgatactccagttaaaactgtatccttaaaagacggtttcaaattcactaatggtacattaacaactgcagaagtagcagctggtggtgttgtgaagttccatgtaacacaaggttcattatctacggataccaatggtactgtatctgctggcacaactggcgtggcaacaacgagtgatgtagcaagtgctgttaatagtgcggtgactgcggctgttaccaatgcgacaggaaatcaaaaattagatatctccgcaggtggtacagatagctccgttaaccttaaaactcaaaaattaacagtagcaggtacaggtgctgcgacagcgtctttgaatggtcaaacgattactgttgatgtagcacaaggtacatttactaataagtctgatggtacaaccagtgctacagctggtgtggctaaagctacggatgtagcatcagcaattaataatgctaatacagcattaagtcaaaaaattactgatgcaactacctcgttgggcacattaggtaataatacatttacattaaaagcagattctacagatacaacagcgcaagcactcaataaatctggtggcttagcgttcaaagtagcgggtgatggcgatttagtatctactagcgctactacagatactgtaaaagtaactgttaaaaaaggtgaattaagtaatgctgcagatggctctctaaatgtaactgatagcggtgtagtaactgcagataacatgaaaactgttgtgaatgatgctatcactaaagctgtcacatctgctaaagatggatctgcatggaacatttctactaatggtggtacagctacaaaagtgtctggtggtaatacggttgatctcattaatggtgacaacatcgagattacacaagatggtacagatggtaagaagattacggttaagacgaaaaaagaccttacattagattctgtaactgcagccaatactgtaaaagtaggctctggtactaaccttattacattggatggtacaacaggtggagtgagtggtaattccttcacagcggggaatgcatctatgaatacgactggattccgtgtaacagggggcccatctgttactactgctggtattgatgcaggcggtaaacaaattactaatatgataagcggtggcacagttgctactaatgccgctactattggtgatgtgaatactaaggttacaactgctattaatgatttaacaactaatttaactaagaatactaatattgcttacacagcaaatactgctactcctggtcaaactgtatccttaaaagatggatttaactttactaatggtacattaacaactgcagaagtaggcgctaatggcgttgtgaagtttaatgtaacgcaaggggcattatctacggataccaatggtactgtatctgctggtacagccggtgtagcaacaactgctgatgtagcaagtgctgtgaatagtgcggttagcacagcggtgaataatgcaacaggcaatcaaaaacttgatatttccgcaggtggtacagatagctccgttaaccttaaaactcaaaaattaacagtagcaggtacaggtgctgcgacagcgtctttgaatggtcaaacgattactgttgatgtagcacaaggtacatttactaataagtctgatggtacaactacagcgacagctggtgtggctaaagctgcggatgtagcatcagcaattaataatgctaatacagcattaagtcaaaaaattactgatgcaactacctcgttgggcacattaggtaataatacatttacattaaaagcagattctacagatacaacagcgcaagcactcaataaatctggtggcttagcgttcaaagtagcgggtgatggcgatttagtatctactagtgctactacagatgctgtaaaagtaactgttaaaaaaggtgaattaagtaatgctgcagatggctctctaaatgtaactgatagcggtgtagtaactgcagataacatgaaaactgttgtgaatgatgctatcactaaagctgtcacatctgctaaagatggatctgcatggaacatttctactaatggtggtacagctacaaaagtgtctggcggtaatacggttgatctcattaatggtgacaacatcgagattacacaagatggtacagatggtaagaagattacggttaagacgaaaaaagaccttactgtagattctgtaaaggcagcaaataccgtaaaagttggttctgctacaaaccttattacattggatggtacaactggcgcagtaagtagtaatacatttacagctggtaatgcctctatgaatacaactggattccgtttaacaggtggtccatctgttacaacgacaggtattgatgcaggtaatacagtgattaccaatgttgctagtggtggtacgacttctacgaacgctgcaaatattggtgatatcacaaaggcgattagtgatttaactactaatttgactaagaatacaaatatcagctacacagcaaatactactactccaggtcaaactgtatcattaaaagatggctttaacttctctaatggtacattaacaactgcagaagtagcagctggtggtgttgtgaagttcaatgtaacgcaaggttctttgtctactgatggcaatggtaatatcacaaacacagcaggtgtagctacaacagatgatgtaaaaaatgctgttaataccgcaattaacaaagcggttactaattcaagtgcagcggtcaatacactaggggcgaatactttcacattaacaggtgataatagtacgtctacaacaggacaagcactcaataaaaatggtggtttatccttcaaagtagcaggtgatggcaactttattactacgtctgctgctactgatacggtaactgtgtctatcaaacaaggtgcatttggtagtaatacagatggtacagctaaatccactactaatggtgtagcgacaacaaatgatgtagccaacatcgttaatacaaccgttactaatgctgttactaaagcgacaggtgctcaagtacttaacatcacagatggcaataataatggttctattaaccttaaaaatgacgcattgaaggttgtaggtacagatggtgttactactgaagtgagtggtaaaaccattactgtaggtttagatacggctactaaggataagattaacaatgctagtgtagcaacgaataaaaatatttctcttgctgcggatagtggtactatatctagccaatctttaaaagatggtgatgtatccttcgcagtgaaaggtgctactggggattatatctctacaaatatgaatggtagtactgtagagatttccactaaacgtgcaaccatcgatagcaatgccacaacaggccaagcttccgtaactggaaatgatggtcttgcaactgcgaaaaatgtagctgacgctattaatgcggcgactgcaaaagcagtatctcaatctgcatggaaacttgctgcagatggtacgaccggtacagaaacgatttccggtggtgacactgttaacttcaaagctggttccaatatggaagtatctcgtactggcaaggatattacctataagacaaaagacaatgttgctttcacaacggtaacagctggtacaggcgctaatgaggttaaattagacggcaatactggcacggtaactgctaaggatatcactgctacgggcgatgtaactgctaaaaatgtaactacatctggtaatgtgactgccgctggtactctgaaaggtgacactgttcaaggtaatactgtgaaagctggtaatgtaacaattacaggtggtacaacaaataccattacaggtctatctaatacaacatggactggttctacaactacaccagaccgcgcagctacagaaggtcaattacaacaagcaattagtagtgccacatcctctgcaacatttaagtttgatgctgataacaatagccaacaaactatgaatctacaaaatggtactttcaaagttactggcgataccatgattacgactaatgctacaagtgcaggtatcggattatcattaaatacgaacaatgttaaaattgcctatgctgcgaatggtttaaatggtcaaacaacgagcattgcaagtggattaaatttcactgatggtgatcatacaaaagcaactgtagcagctagtggcgtagtgaaatacgatgctaaaacatcgactatttccgttgcaaatggacatgctgcggctagtggcaatgatctcgcaactgcagataatgtggctgatgcgattaatcaaatgacccaaaacaatgcggggaatacaacgcaacttcgtcaagaaattagcaaggttgctaccgaaacgcaacgtgtaggtgctcatgcggctgcgatggcggcgttgaaaccaattcaatacgatccattggctccaacacaaatcatggctggcgtaggtaactatcgtggtgaaagcgcagcagcattaggtattgcacactatacaaatgacaatactatgtttaacgtaggtgtgtctgttggtggcaaccataatatgattaatgcgggcgtaacacacaaatttggcattagtgctgaaaagaaaaatattcctgatcgttataaagcgggccctattagctccatttatgtaatgcaagatgaaatgactcaattacgttctgaaaatgaagcgtacaaggctaagcttgataaacaacaatctgaaatcgatgcattgaaagcagctgttgatcaattgcttgcttctaaagcatagttttaggtgcatacacaatttatatatttgtatatcttcatgtatgaatatgtatatggtgaaagccaccactcgttatgagtggtggcttttttgtatttgaaattatctatcctattgaaaagtttatcttaaatataaaatgaattagaaaatacattttaaaaataaaatatattactggataataaatatgagataaaaaatactcatattaaaattaaatagatatattatttagaatacagattaacaatttgattgcatattcattcataaatatttatccaaaaagataaaaatatacatagataaaaataaaagaaatagattaaatctatattcttttgactttcgaagatatttgatttgcaattaaatattcgtataatgcatcaaatttcattgtttgatatagataaaatatgatagaattatgaaatgagctttaaaatataatgggtatattttgaggtataacgaaatacaaatactagaaattgatttatataagatatggttttgagagatagttagtaaaaggaaaacgaatgaacaagatttttaaagtaatttggtctaagtcaaaacagtgctacatcgtagtatctgaaattgcgaagaacaaaacaggtaaaaagaaaatcgtagtggccgggatatttgcggcgttggcgatggttaatggtggagattcaaccgttgctgctgctctaccaggtggtgttacaggccaaaatgctatgtggattggtaatggtgctactgtaaatggaactatagtaggtcaaaattctatagctataggcagaaatgcaaattctaaatcagcaaaatcaatagcaattggatctgattccgtggctgaaggtgtatacaagagctcaacagattatacaggtgctaccgctattggtgctcatacaaatgctaaaggtgctggtgcaacagcacttggtgtagcaacttctgtaaacggggactacagcataggtcttggttggaatacgaatgtttctgcggacaactctatcgctataggtgtacaatctagatctactaaagaaggctcaactgcaatgggaccatccgctagaggttatggtgagggctccttatctttaggctaccaagctctggcaggggctgatgtttatggttctggtattaatgttattaataatcccattaatgataatggtggtataattaacagttatgcaaaatggggcgatgctgccattggtttacgtgcagttgcaacaggaggcaatgccactgcacttggccgtagtgcgagagccgctgcagctaacgcaattgctatcggtggtgggaatggtaattctgctactgataatactgaaaaaacagaggctactggtgagaaagccactgcaattgggtataatgccaaagcgggtgctgaaaagtcaaccgcgattggtgctggtgcaactgccaacggattagattcttttgcaggtgcatctggtacagcttctggtgctgcctctgttgctattggtaaagtttcgaaagcaacggattcaagtgctactgcggtaggcgatggtactagtgcgttaggtcaaggtgcgactgctttaggtagtaatgcaaccgctaagaatggattcgatttggctgtaggccgcagtgtaacatctgagggtggtgcagctacggtagttggttataactctaatgttaaaggtaatcaatccattggcattggttctacaattgccaactctgcacaaaaagccactgctattggttataaagttacggtaagtggttcgggggctattggcatcggttcgggtacagatggcggtagtaatgtaatagcatctggctcagatgctattgctttaggtacatctacacttgcagattctgaaaaagctattgccattggtgcaaattcaaaaggtactaatattggtgctaccgcattaggtcgatcttctgaagcaacgggagcatcagctactgcattaggatctctagccagtgctacaggttcaacagctactgctgtggggatggaagcatctgcaactggaaacgaatcactagctattggcaaaaaagcaagtgcaacgagtggtagagcattagcagtcggtacgaatacgacagctacgggagcaagctccgtagctgttggtagtggcgctggtggttctggtattataggctttgcaggtagtttaaactctactgctggcgttgttaatacgaatagaacaattaactacgccactactgcagaaggtgatactgccgttgcagtggggtactatgccaatgctaagaatagtggtgtcgcagtaggtcaaaaagcgttagccgcaacaggtggcgtagctattggtaaaggcgtccttgaggatacgggcaataattatgccggtggtgttgtaatcggtcaagattctgcatcaacaggtgtttattcattggcgatgggctttaatgcctttgctagtgggtctacctctatggctattggccatacagttagtgcagatggtggttttgccgttgctatgggtcgaaaggtatctgcttcggggacatctacagccatcggtcaccatgcaaccgcaacgaatggtggtttagctattggaagccaagacaatgatacatctaacgatagaacgaccgcctctgcaacaggtgctgtagctattggtaagaatgctaaggctacttcggaagatgcagtagcgattggcacaaatgcacaagcgactttacaaggtgctgttgcgctaggtagtggttctacaacggcgacaggagctacaagtcaaggatctactacgattaatggtattacctataattttgcaggtgccacaggcaatccaaatatgcaagtttctgtaggtagtgctggcgcaacacgacaaattaaaaatgttgcagcaggggaagtatctgctacaagtacagatgctattaatggatcccaattatatgctgtagcaagggctgttaaaccgctaaaatacgtatctgtgaactctacagcagcaggtactggtagtaatgttgataatgatggggcacaagcatctgattctattgccataggtccttctagttcagttacaagacaaaatggtattgctatcggtaatggggcgaaatctttaagtgaagagagtattgttattggtagaaatgcacaagcagaaactaagactggtgcaggtttaacaactacaagtcgagcaattgcaataggatcaaattctcgtgtagcagccaatgtaacacaaggcattgccattggtagtggtctttctccagatgaaggtgctgttgttacaggtgaccaatcaatcgctattggtggcaatgtaaaggttgatggtcatgctgctattgccattggtggcgatgatgctaaaaatgcttcaaatcagcaagtctcttatacgaacactaatgatactgaagttactggtaccttaagaaatgcaattcttgatctaacagggtatgatttatcaaaatacaaaggcactacagcaggacatgctggtgtagcctatggtacaagtgctcttgccggtaatgcaggcgttgcaattggtactgcagctgacagtatgactcgtatgaatgataaaggccaggttgttaatgataaacctgttactaatgctgtagctattggtaccggcgctcgtgctaactttgataactctgttgccatcggtggtggttccaatacagatcactatgcgacaaaacaagtaaatgccgttattgatggtgttgaagttaagtggtctggtggtgaaaatatcgcccctggtgatgtagtatcttttggtgcaaaaggtttcgaacgtcagcttaaaaatgtggcgccaggtgaggtctcccaaacaagtactgatgcggtcaatggttctcaaatttactctttggctcgtaaagttacgaacattatgaatggtggatccggctcagttgtgaatgtgaattctttaggtcaaccactttcaaaggttgtaactacagaaaatggtaataaggttgaaaaatattatcggacaagtgatatcagagaggatggaactgttccaacaggtacttcagaacagacaccaacatccttagctctagttaatgtttctgagccgaatgcaaatttacgaacaacaaaaccacgtattcttggtaacgtagctaatggtgtaaatgataatgatgctgttaatgtatctcaattaaaagcagcgactgtaaaatatttttctgtaaactctacaattggtggtaatagaaataatgataaggctacgggtataaatgctattgctgttggaccagatgcagaagctgcaggaaaaaataccatatccgttggtaatgcagctggttatcaaactactggtgaaaataacgtggggattggtacaagtgctggtcgcaaacttagtggtgataataatatcagcattggtagtagttccggaaataactctgttaataatgatccaaataaaagaactacttatacaaataactctgttatgcttggtaatgaggctaaagttatagatagtagtgctcaaaatagcatagataatgttgtggttatcggtaaccgtgcaacaagtagtggttcatcaagcgtcgttcttggtacttcagcaagtggtactgataaaaatgtaattgcaataggtaattcatcaaaagccactagtattagtgcggttgcattaggtaatactgcaaatgcaactggcttgaatgcaatggcattaggtttgaatacaaacgctagtaatgaaaattccgtagcaataggaaatactgctaatgcatctgctaaaaatacattggctatggggacaaatacaaaggcatcgtctgaggccgctatagcattaggagctaatgccgaatcaagtggatttggttctattgcgattggtgaaaagagtaaggctcaaccaactactgctacatctccagcaggaagtgttgctataggttatagaactgaatctactggtgattttgctgttgctttgggcagtggcaatggctcttataagggtgcttctgctaatggagttggaactgtagcggttggtacagcgactgttaccgcaagtggtcgtaattttcaaactgttgtaggttttggtgcgacaaccaataatgtggatgcagctgcatttggtcatgaagcgaaagcttatgctgagaagtctcttgcattaggcacaggaagttcagctactgttattggtggtgttgcattaggtagtggatctgttgcaaatactgataaaaataaacaaggctttgatcaaaaaactggtcgtactgacacttatgctggattaaagaatgaggcttttacgtctactgctggtgctgtatctgtgggtgatgtagctaataaagtaactcgtcaaattacaggtgtagcggcaggtacaaatgatacagatgcggtaaacgtagcacaactaaagagtgttaatttagcttttacaggcaatactggtaatggcggagatgttaatctttcacaaagtaaattagcattaaatggtgataatcaatacattacgacaaaagctgatggtaagagcttaacaatttcagggaaaaaacaggagattactgtatctaatggcgtggcatcagcaaattcaggcatggctgacgcaagcaatgtagcacaagctattacgcaagccgtatcggatgtgaagtataattggaaattgtctgctaatggacaaaactcaactgaaaccattgataaaggtgacactgtagattttagcggcgataataatattactgtaagtagaagtggtaagaagattactactaaattaaatgatactattacagtggattctgttaatgctaagaaaaaagtgacagttggtactggtgcaaatcaaatcgcattagatggcacgttgggcgttgcaactgtgggtgctgccggatctaatcaaattataatgaatggttcgttagggactattcaaggaaacaagtttattggaaattcctttaaggctggaagatcttcgattgataatgatgggcttactattacaaatggtccatctgtgcttgccacaggaattaatgccggaaataaacaaattacaggtgtttcgagtggcggtacaatagatactaatgcagcaaatattggtgatgtaaaaaaagcagtagcaaatgtatctcaaaacttaaacatcagtgatggcacaaaagatagctctgtggctctaaaaagtcaaaaattaactgttacaggtacaggtgcagcgacaactgctgttaataatcaaactattactgttgatgtagcagagggaacgctttcaaataatgcagacggtactgtgaaagccgatgctgctggtgtagccacaactaaaaatgttgccgacgttattaataagactatctccgataatcaatatagctggaaactatctgctaatggcgaagccactactgcaactgtaggcaaaggtgataccgtcgatttcactggcgatactaatattacagttgatcgtaataataaagatatttctgttaagctaaataaaaatcttacagacatgaactctatatctcttggtaatgcaagaggtgaaacaattgtcttgaatggtggcgatggtagtattaaagctggtaaagctgagtttaaagataatgttggtgctggttctactattactagtgatcagttaaagtttacgaatggtgcaactggtgctaacgaggctacaaccactattgctttagatacagtagccattcaatcagggcctaatagcagtgctcttacatccaaatatctcacgttcagtgataaagatggtaataatgctgaaggcagtgcaaaaggtgtggttttccagaatgcagccggtaaactggttcaatttactgttgatgaaatcactgctggtggaaataaaatccaagaggttgctgaaggtacagctgatacagatgcggttaatgttaaacaattaaaagatacaattggtactcaatccttaacatatcgtgcaaatacatcggctgatacagatgctaaatctgttaaattatctaaaggcttagactttgtaaatggtacatccacggtagcatctgttgatgaagatggcaaagtatcttttgatcttaatacagcaactaagactcaaatcaatacgaatactacagatattgcaacaaacacagcaaacattgcccatactattgcgttagctgatgataacggcacatctacgactgctaagtccttaaaagatggtaatgtatcttttaatatcaaaggggataacaagtttatctcgacagctgcatctggcaatgatgtaaccttgactgttaatgaacaagctattaaggatgctgctaaggctgcttcttctttcaaggtgaaagcgaatacgcatgctgaagaagaggtaaaaggtggcgatactattacctttaacaatggtgataacattgcaatcagccaaactggtaagactttcaccatcggaacggctaagaatataactgttgattccgtaacggcaggtaatactgttatcaatacatctggtttaacaaatggtacaactgctattacaggcacaggtattacaacagataaagtaactgtaggtggtatctctattgataaaactgctggtatcaatgctggtggtaaggttatttctaatgtagccagcggtacagtaaacaataatgctaccgatgattctaatgcagcgaacattggtgatgtgaaacaagctgttgctaacttgtctcaaaaccttaatattactgatggtacaaataacggcactgtggaccttaaaaaccaaaaacttaacgtggctggtgctaatggtgtaacagcgactgtaaataatcaaacgatcacagttggtttggacgcgaatactgttaatgctacaacgaaggggattggccttactgctgatactggttctacaggtaataaataccttaaagacggtgatgtatcctttgcggtaactggcgatggcaatcttgtgagcacaactgctacggcagcgggtgtgaaagttgctgttgatgcggctaaagtgaaagatttagctgttgctgctgtaacggtaagtaaagacgcacaagcagataatcctattacggtaaccccaacagcgggtactaattctaaagattatgcaattggtatcgatacaacaaaactcgctgctaaaactgatttaacatatcgtgctaatagtgcggcagatgctaatgcgaagaaggtttctttatctaaaggtcttgattttgtagatggtgactccacagttgctactgttgataacgatggtaaagtatcctttgatcttaatacagcaactaagaatcaaatcaatacgaataccacagatattgctgctaataaagggaatatcactaaaaatacagccgctattgctactaatacagcagcgttagctagaaatatctcccttggtgcagatgctggcacagcatccagccaatccttgagcgctgctgatgtggcatttaatgtgaaaggcgcaacaggcgactttgtatctactaatatgaatggtaatacggttgagatttctacaaagcgtgctacgattaacagtaatgccacgacaggtgaagcgtccgtaactggtaatgatggcttggcaactgcgcaaaatgtagctgatgctatcaacaaagcggctgatgcagcaaaagcaggtgcggcttggaatattacaacgaattccagtacaacagataaaacggctgttaaaggcggcgatacagtagatcttgttaatggtgataacatcgagattacacaagatggtacagataaaaagaagattactgttgctactaagaaagatattactgttgattctgtaacagctaataacaaagtaactgttggttctggtgcgaataaaattaccttggatggcactgatggttctgtaacgggtaaagctttcacaggtactacttttacaggcacatcatttacaggtacatccttcacggcaggcaatactgttatcaatacaaatggtttaacgaatggtacaacggccattacaggcactggtgtaacgacagataatgtgaccgttggtggtatttccatcgataaaacgacgggcatcaatgctggtaataaggtgattagcaatgtagctagcggtggcactacattgacgaatgcggcgaatatcggcgatgttcaaaatgcagtggctaacttgtctcaaaacctcaatattacggacggcacacataacggcactgtagaccttaaaaatcaaaaacttaatgtagctggtactaatggcgtaacggcgactgttaataatcaaacgatcacagttggtttggatgctgacacagttaatgctactactaagggcattggcctcactgctgacactggttccacaggtaataaataccttaaagatggggacgtatcctttgccgtgaccggtgatggcagcctcgtgagcacgtctgctacatcagcgggtgtgaaagttgctgttaattccgcatctatcactgctggtacagatggtacaattacaggccctacaactgatggcgtagcaactgctaaaaacgtagctgacgctatcaatgcagctaaaaaggcgtctaaaacagaaatcactgcgaatactggtgaggctgctaatgctacaacaggtaatgtgacattaacatctaccacagttgctgatggacatactatctatgatgtaaaactcaacgataaggtgacacttggttctggtgctaatgctgtaactatcgatggtacaacgggggccattacaggtaaaacggctactattggcggcgttactgtaaatggtacggctaatactattggcggtttatctaatacaacatggaatggtacagccgtatctggacgtgctgcaacagaagaccaattgaaggctgccactggtgctacaacattgaagttcattggtgatgtagcaactaatactggatctgtaaatcttaaagatgatacatttggtattaaaggcgatggtaaatacatctctactgacgtaaacggtaaaaatgtaaaacttacagtgtctgaagcagaagttaaaaaatctgctgtagctgctgtaacagtcagcacagatacaactgatgctaataatccattgactgtaacacctacagctagtgcagatggtacaactaaggattacaaagtaactattgatggtactaagattgcgaataagacaaacttgtcctataaagcaaataacggtactgcaaaacaagtatccttagcagatggcttagatttcacaaatggtactttgacgactgcatctatcgatgataaaggcgttgtgaaatatgatgtaaatacagcatctattactgctggtacagatggtacaattacaggccctacaactgatggcgtagcaactgctaaaaacgtagcggatgctattaatgcggctaaaaaagcatctaaaactgaaatcacggctaatacaggtgaggctgctaatgctacaacaggtaatgtgacattaacatctactacagctgctgatggtcatactatttatgacgtaaaactcaatgataaagtgacacttggttctggcgctaacgctgttacagtagatggtacagctgcaaaagtaactgcaggtgtaacaactgttgatggtgcaactggcacaattactactggtggtacaaactctattaaggtagatggtgcaactggcactgtaactggtttggctaataaagattggactcctggtgtaacaaaagccgtaacaggccgtgctgcaacagaagatcaattacaaaaagtagcagatgctgcatctagccaaacttggaatattacggcagataaagcaggtacaactggtgcacaaacaggtactaagaaaaatgctactgttggcaaggatgaaactgtcgaattggttgcaggggataaccttaccatcaatcaaaatgaacgtaagtttacgtattcattgaataaagaccttgctaatttgactagcgtatctgtcggtactggtacaactgaaactattaaacttgatggtgcaactggtaaaatcactgctaaaaatgcagttattggtggtgtaactgtcgatggtgataataatcatgtaactggcttggccaatacaacttggaatggtacagctacaactggccgtgcagcgacggaagatcaattgaaagccgtagccgaaacagctaaaacgactactgatgcagttaacttgaaattcactggtgatacaaatacatcccctggtgtagtaaatcttaaggatgatacattgggtattataggcgatggtaagtatgtatctactgatgcaaatggcaagaatttgactgtgaaagtatctgaagcagaggttaaaaaatctgctgtagctgctgtaacggttagcacagatacaacagatgctaataatccaatttctgttacaccgacaacaagtgcagatggtacaactaaggattacaaggtaacaatcgatggtacgaagattgcgaataagacaaacttgtcctataaagcaaatggtggtactgtaaaacaagtttcattagccgatggtttgaactttaagaatggtacattaacaactgcatctatcgatgatgcaggcgtcgttaaatacgatgtaaatacggcatctattactgctggtgcagatggcacaattacaggcccaactacagatggtgtagcaacagctaaaaacgtagctgacgctatcaatgcagctaaaaaggcatctaaaactgaaatcactgctaatacaggtgaagcggctaatgctacaacaggtaatgtgacattaacatctactatagctgctgatggtcatactatttatgatgtaaaactcaatgataaggtgacacttggtactggtgctaatgctgtaactgttgatggtacaacgggtacgattacaggtaagactgctaatatcggtggtgttactgttaacggtacggctaatactattggcggcttatctaatacaacttggaatggaactgctactactggccgagctgcaacagaagatcaattgaaagctgttgcagatgctgcaggtagccaaacttgggaaattacagcggataagaaagctggcacttctggtgctcaaactggcacaaaagaaaatgctaaggttggtaaggacgataaggtgtccttaattgctggtgaaaatttaaccatagaccaagtaggtaagaacttcacatactccttgaatacagaccttgtgaagatgaactctgcaacctttgatgcaacaggtggtaaaacaactgtcattaaaggcgatagcattgttcaaactgatggtgctaatgtaaatacatctaatgctacatccaatacaattactgatggcacaaatacaagtacaatcactgctggtaaggcacaaattggttccgttggaatcgatggtgtagtaagcaagattacgactggtggtgccaatgcagtagtgattaacggtgctgatggcacaattaagactggtacagtaacagtaactggtggtacaacaaacgatatcactggtttgtccaacactactgtgactggtgcagactttgctacaaaaggccgtgctgctacagaagaacaattgaaagctgctactggggctactacattgaagttcactggtgatgtagcaaccaatactggatccgtaaatcttaaagatgatacattcggtattaaaggcgatggcaaatacatctctactgacgtaaacggtaaaaatgtaaatcttacagtctctgaagcagaagttaaaaaatctgctgtcgctgccgtaacagtcagcacagatacaacagatactaataatccattgaccgtaacacctacaacaagtgcggatggtacaactaaggattacaaggtaactatcgatggtactaagattgcgaataagacgaacttgtcctataaggcaaatgatggtactgcaaaacaagtgtccttggctgatggcttgaacttcaagaatggtacgttaacaactgcatctatcgatgataatggcgttgtgaaatacgatgtaaatacagcatctatcactgcaggtacagatggtacaattacaggcccaactacagatggtgtggctacagctaaaaatgtagctgatgctattaatgcggctaaaaaagcatctaaaacagaaatcactgctaacactggtgaagcaactaatgcaacgacaggtaatgtgacattaacatctactacagctgctgatggtcatactatttatgatgtaaaactcaacgataaagtaacgttgggctctggtgctaatgcagtaacaatagatggtacagctggtaaagctacgattggttcctctgtcattaatggtgtcaataacacattcactactggtggtgctaaggccgtaaccttagatggtgccacaggcacaattacaggtacaactgctaatatcggtggtgttactgttaacggtacggctaatactattggcggcttatctaatacaacttggaatggtactgctactactggccgatctgcaacagaagaccaattgaaagctgttgcagatgctgcaggtagccaaacttgggaaattacagcggataagaaagctggcacttctggtgctcaaactggcacaaaagaaaatgctaaggttggtaaggacgataaggtgtccttaattgctggtgaaaacttaactgtagaccaagcaggtaaaaacttcacatattccttgaataaagatcttttgaagatgaactctgcaacctttgaagtaacaggtggtaaaacaactgtcattaaaggcgatagcatcgttcaaactgatggtaatcagactaatactgctacagcatctggtaatacagtagcaaatggtactaagtccacagaaactacagcagatggtcaagttattaaagacggtgctaagtccaataaatctactgtagataacaatgtaattgatgatggtaatggcaatgtaaatacatccaatgctacatctaatacaattacagatggtacaaatacaagtactattactgctggtaaagcacaaattggtacagtaggtatcgacggtgtagcaagcaagattactacaggtggtgctaatgctgttaagttagatggtgtagccggcacaattaaaactggtactgtaactgttactggtggaactacaaacgatatcactggtttgtctaacacgactttatctgcaactgactttgcaactaagggccgtgcagctacagaagagcaattgaaagctgccactggtgctaccacgttgaagttcacaggtgatgtagcgaccaatactggttccgtaaatcttaaggatgatacattcggtattaaaggtgatggtaaatacatctctactgacgtaaacggtaaaaatgtgaatcttacagtctctgaagcagaagttaaaaaatctgctgtagctgctgtaacagtaagcacagatacaacagatgctaataatccattgaccgtaacacctacaacgagtgcagatggtacaactaaggattacaaggtaactattgatggtactaagattgctaacaagactaacttgtcctataaagcaaatggtggtactgcaaaacaagtttcattagccgatggtttgaactttaagaatggtacattaacaactgcatctatcgatgatgcaggcgttgttaaatacgatgtaaatacggcatctattactgctggtgcagatggcacaattacaggcccaactacagatggtgtagcaacagctaaaaacgtagctgatgctatcaatgcggctaaaaaagcgtctaaaactgaaatcactgctaatacaggtgaagcagctaatgcaacgacaggtaatgtgacattaacatctactacagctgctgatggtcatactatttatgatgtaaaactcaacgataaagtaacgttgggctctggtgctaatgcggtaacaatagatggtacagctggtaaagctacgattggttcttctattgtggatggtgtaaataatacattcacaacaggtggtgcaagctctgtaacattaaatggtgctacaggtacaatcacaggtaagactgctaatattggtggtgttactgtagatggtacaaataaccatgtaatgggccttgcgaataaagattggactccaggtgtaacacaagctgtttctggccgtgccgcaacagaagatcaattacaaaaggtatctgacgcagttggtgctggttggaaagtgaacactggtaaggtcactggatctacaggtgaatctaatggtgctgcatctactaaggtagcaagcggtgaagaagttcagttccaagctggtaacaacttaatcgttgatcaaaatggtaaaactgtagcatactccttgaataaggcacttaaagatttggaatctgctacgttcaatggtacaggtactaacaaaactgttattactggtgattccattacacaaactgcaggtactcaaacgaatacatctactgcaggtggcaacactgtagcagatggtactaagtccacagaaactacagcagctggtcaagtgattaaagatggtgctaagtctaataaatctactgtagataacaatgtaattgatgatggtaatggcaatgtaaatacatccaatgcaacatctaacactgttacagatggtacaaatactacagcaacaacatctagctctgtaactgtcaaagataacgctggtaacagcacagttattacaaaagataatgttacaactggtgtaggtgctaacaaagttacccttgatggtacagcaggtaaggcaactattggttcctctgttattgatggtgtaaataacacattcacaactggtggtgctaatgctgttaagttagatggtgcagccggtacaattaagactggtactgtaactgttactggtggtactacaaacgacatcactggtttgtctaacacaaccgtaaccgcagcagactttgcaacaaaaggccgtgcggctacagaagaacaattaaaagctgtaggcgaacaaacatggcaaatcacggctgataaagatgctactacgtctggtgctcaaacaggtactaagaaaaatgctaaagtaggtaaagacgataaagttcaattgattgctggcgaaaacatgacagtaaaccaaaacgaacgagacttcacatactccttgaataaagaccttgtgaagatgaactctgcaacctttgaagccacaggtggtagaactactgttattaaaggcgatagcatcgttcaaactgatggcacaaaagtgaatacatctacagcaggtggtagtaccgttgcagatggtactaagtccacagaaactacagcagatggtcaagtcattaaagatggtgctaagtctaacaagtccactgtagatagtaatgttattgatgatggtaatggtaatgtaaatacatccaatgctacatctaacacaattacagatggtacaaatacaagtacagttactgctggtaaagcacaaattggtacagtaggtatcgacggtgtagcaagcaagattactacaggtggtgctaatgctgttgtgattaatggtgcagatggcacagttaagactgggacagtaacggtaactggtggtactacaaacgatattactggtttgtctaataccaccgtaaccacagcagactttgcaacgaaaggccgtgcggctacagaagaacaattaaaagctgtaggcgaacaaacatggcaaatcactgcagataaagatgctactacatctggtgtacaaacaggtactaagaaagatgccaaggtaggtaaagacgataaagttcaattgatcgctggtgaaaacctcacagtgaaccaaaatgaacgagacttcacatactccttgaataaagatcttgtgaagatgaattctgcaacctttgaagcaacaggcggtaaaacaactgttatcaaaggcgatagcattgttcaaacagatggaagaaaagtgaatacatctactgcagcgggtaatactgtagtcgatggtgctaaatctacagctactacagctgatgggacaactgtaactactgctaacggaaatactaattacgcagcagatggtgtacgtatcaatacaactggtaagactcctgtatcgttaacggatgccggcttagataatggcaataatgtaattaaaaatgttgctagtggtcatgtgaataatgatgctacagataatacaaatgcagctaacattgcagatgtgaaaaaagcaacaactacagtgactgcaaatgccggtgaagcagctaatgcaacgacaggtaatgtaacattaacatctactacagcggcagatggtcatactatttatgatgtaaaactcaacgataaagtaacgttgggctctggtgctaatgcggtaacgattgatggtacagcaggcaaggcaactattggctcttccgttatggatggcgtaaacaacatatttactactggtggcgctaatgctgttaagttagatggtgtagccggcacaattaagactggtacagtaacagtaactggtggtactacaaacgatatcactggtttgtctaacacaaccgtaaccgcagcagactttgcaacgaaaggccgtgcggctacagaagaacaattaaaagctgtaggcgaacaaacatggcaaatcactgcagataaagatgctactacttctggtgctcaaacaggtactaagaaaaatgctaaagtaggtaaagacgataaagttcaattgattgctggtgaaaaccttacagtaaaccaaaacgaacgagacttcacatactccttgaataaagaccttgtgaagatgaactctgcaacctttgaagccacaggtggtagaactactgttattaaaggcgatagtatcgttcaaaccgatggcacaaaagtgaatacatctacagcaggtggtaatacagttgcagatggtactaagtccacagaaactacagcagctggtcaagtgattaaagatggtgctaagtctaataaatctactgtagataacaatgtaattgatgatggtaatggcaatgtaaatacatccaatgctacatctaacacaattacagatggtacaaacacaagtgcaatcacagctggtaaagctacaattggttcctctgttattgatggtgtaaataacacattcactacaggcggtgctaatgctgttaagttagatggtgcagccggtacaatcaaaactggtactgtaacagtaactggtggtacaacaaacgatattactggtttgtctaacacaaccgtaaccgcagcagacttcgcaacaaaaggccgtgcggctacagaagaacaattaaaagctgtaggtgaacaaacatggcaaatcacagcagataaagatgctactacttctggtgctcaaacaggtactaagaaagatgctaaggtaggtaaaaatgacaaagttcaattgattgctggcgaaaacatgacagtcaaccaaaatgaacgagactttacattcactcttaacaaagatcttgtgaagatgaactctgctacattccttggcacaggtagtaacaaaactgttattactggtgattccattacacaaactgcaggtactcaaacgaatacatctactgcaggtggtaatactgtagcagatggtactaaattcacagaaactactgctgctggtcaagtgattaaagacggtgctaagactaatacatctactgttgatgagaatacaattgtagatggtactaagtctaataaatccactgtggatggtaatactattacagatggtacaaatactacagcaacaacatctagctctgtaactgttaaagataacgctggtaacagcacagttatcacaaaagataacattacaactggtgtaggtgctaacaaagttacccttgatggtacagcaggtaaggctacgattggttcttccattgtggatggtgtaaacaacacattcacaactggtggcgctaatgctgttaagttagatggtgtaaccggcacaatcaaaactggtacagtaacggtaactggtggtacaacaaacgatatcactggattgtctaacacaactgtaaccgcagcagactttgcaacgaaaggtcgtgcggctacagaagaacaattaaaagctgtaggcgaacaaacatggcaaatcacggcagacaaagatgctactacttctggtgctcaaacaggtactaagaaggatgctaaggtaggtaaagatgacaaagttcaattgattgctggtgaaaacatgacagtaaaccaaaatgaacgagactttacattcacccttaacaaagatcttgtgaagatgaactctgccacattccttggcacaggtacaaataaaactgttattactggtgattccattacacaaactgcgggtactcaaacgaatacatctactgcaggtggcaacactgtagctgatggtactaagtccacagaaactacagcagatggtcaagtgattaaagacggtgctaagactaatacatctactgttgatgaaaatacaattgtagatggtactaagtctaataaatccactgtggatggtaatactattacagatggtacaaatactactgaaacaacatctagttctgtaactgtcaaagacaatgctggtaacagcacagttatcacaaaagataacattacaactggtgtaggtgctaacaaagttacccttgatggtacagctggtaaggctacagttggcgcctctgtagttgatggtgtaaacaacacattcacaactggtggtgctaatgctgttaagttagatggtgcagccggtacaatcaaaactggtactgtaacagtaactggtggtacaacaaacgatattactggtttgtctaacacaaccgtaaccgcagcagacttcgcaacaaaaggccgtgcggctacagaagaacaattaaaagctgtaggtgaacaaacatggcaaatcacagcagataaagatgctactacttctggtgctcaaacaggtactaagaaagatgctaaggtaggtaaaaatgacaaagttcaattgattgctggcgaaaacatgacagtaaaccaaaatgaacgagactttacatttacccttaacaaagatcttgtgaagatgaactctgccacattccttggtacaggcagtaatacgacagtcattactggtaacagtattacacaaactgcaggtacgcaaacgaatacatctacggcaggtggtaatactgtagcagatggtactaagtccacagaaactacagcagctggtcaagtgattaaagacggtgctaaatccaataaatctactgtagatagtaatgtaatcgatgatggtaatggtaataggaatacatctaatgctacatcgaataccattacagatggtacaaatacatctactataactgctggtaaagctaacattggaaacattgctgttgacggtgtgaacaataagattactatgggtaatggtgcaacccctgttacactagatggcgctaatggtcatttggatggtttaactaatacaacatgggttccaggtgtaacaaaagctactactggtcgtgctgctaccgaagatcaattgcaacaagtatctgatgcagtaggcgctggttggaaggtgaataccggtaccgttgctggttctagcggtgtatctaatggtgctgcttcaactaaggtatccagtggtgaagaagtaaaacttcaagccggagataaccttgtcatcgaccaaaatggcaaaacagtatcttattccttgaataaagaccttactaagatgaattctgcaacctttgaagcaacaggtggtaaaacaactgttatcaaaggcgatagcatcgttcaaacagatggtggtaaaacaaatacatctaatgcagcgggtaacacagtagtagatggtaataaatccactgctacaactgcagcgggtactactatcactgatggtgctaagacgaacacatctacagctgataaaaatgtaattaatgatggcgcaggtaatactaatgtatccaatgcaactagtaatacattgaaaaatgcagctggtgatgaaactaaggctgatgctaagggagtaactgttaaagatgctgctggcaacaatgcaactttcactaaagatggcataacgattacaaaaactggtaaagatacggtttccttgactagcaatggcctcgataatggcaagaataagattgtgaatgttgcggctggtgtggcgaatacagatgcagttaatgttagtcaattgaaagaatatgctgctaagtccactactgaattgactgctaataatggtgaaactgcaggtaatacgaagggtaatattgtattaactaagacaactgctgccgatggtcatacaatttatgacaataagttgaatgataaaattaccttagggacagatccaatgaaggcggttacagtagatggtactactggcacggtaacaggcttaactaataaaacttggacaccaggttctatcgtttctggccgtgcggctacagaagatcaattgaaagaggccgtagctgattctggttggaaggctgctgttgataaagaaggatctggtcaaagcactgttgtaggtacgagccctgaaaaaatcaaggcagaagaaactgttactttcaaagcaggcaataacatgatggttactcaaacaggtaaatctatcagttatgcggtaaatcctgagcttacagacatgaagtctgctacatttaaggatgcggctggtaatacaacggtaacaaatggcaatggtattaccattacgcctggtagtgcgaaccctacaaatccacatgcaggccctgtatccttaacgaaggatggcctcaataatggtaataaccaaattaaaggggttgcgcctggtacagatccaacagatgcagtgaatgtatctcaattaaatgcgtctaatgcaaatactagccaagctatcaatcaaatagcaggtgaagtacaacatgttggtgctcatgcggcggcaatggcagcattgaaacctattcaatacgatccattggaaccaacacaagtcatggccggtgtaggcaactatcgcggtgaaactgcggcagcccttggccttgcgcattacacaaatgaaaacactatgttcaacgtaggcgtttccgttggtggtaaccataatatggttaatgctggtgtaactcataaatttggttacagcccagaaaagaaaaatattccagatcgttacaaagcaggccctattagctctgtatatgtaatgcaagatgaagtatctagccttaaaaaggaaaatgcggaacaaaaatatgttatcgcggaccaagcagctcgtcttactacgttagaagctgagaacgaacaacaacgtcgtgaattggcagaaacgaagaagggcttagatgatttgaaagcagcggtagataaattgttagcatccaaaggctaagtaatatatgattgataataaaaatcaacttgtaaagatataataatcttggaataaaataaagaaccctcttaactacgatacttataccctgataggtataaaacgtatgcaagggggttctttgcgtttttgatataagttattatttaaaatgtataacatatgaatgacttctcatatgttatatgatataatacggtaatattatgggaagtttaatgtcatctcttgaggtttattatgaggagtcattatgttaacatcattacaacgctggttctcagtagataccatattaccgatgaaggatcgactggggccggtagatactacaaaaaacttatataataaatacttaaaaattgcttggcctgcgaccttgcaaggactcatgatgcagttgatgactgccattgatttggctatggtaggctccttgggtgcctctgcactggcttctgtaggtatcatgggacaaccagaaatggttatgctcgtcatttgccgggccttatcgattgcagtcaccgcaattattgcgcgccgtcatggtgaaggtgatgtagatggcatgaatgcagtgctcaagcaatccatactactgaactttttaatttatattccattgctcgctatgtgcttatttaatttagagcatattttgcgatttaccggcgcagaggatgggtatattgaaacggctgtttggtatggtcggttcattgtcatgagccttgtgttccagtcctttagccaaattgtaggaggtgccctcatcgggtatggcaatacaaaggttatttttaaatccaatgtggtggggaatatcttaaatacgattatgaatttcttcttaatctatggtattgcctttttcccagaatttggtgtcatgggggctggtatttcgacgttcatcagtagtgccgttatcgcagcattgctattgcgggctatttcgcaacataccaagactggtctaaccttattgcatccgtcaaaatggcgctttgagcgttccgtacttcatacgatattccacgtaggaggtagctctttaggggagcagttctttgaacgctttggtatgtatacatataccatgattgtggcatcccttggtgccgtaccgttggctgcacattatgtgtgtatgaacttgatggatatattctattacttcgccatgggccttggctttgccggtgcttctcatacggggcaaaacttaggacataaacggccggatttagcgaaggcttttggtcgtatcggtgctcgcatgggtttatttgtgggggtcgttagcggtctcatttttattagtgccggtcatttgctggtacaagcttatacacgtgaaagcgaggttgtcacattagctacggcattgatgggcattatggctatcgctgcctttcctcaagcactacaacaggtctttgcaggcgtgttgaaaggtgcaggtgataccttctatatcatgaagtattcattaattagtgttgctgttattcgcccaatcattacctatgtactatgtattacattgggccttggtctatatggggcatggatttctctatgcttagatcaatcgttacggcttgtttgcgcctacatacgttttataggtggttcatggcagcataaggtggtataggtacattgaaacttttaaaatagtttatgaaagttttatgaaaaacttcttgcctagtaattaagaatggtatacaatacagatgtggaataaatgacacgttggggaacgtgttgtttgtaaaaatcatcaatttcacgtatatatgtaagggatatatatatgaatataaagaggcatcggccagtaatggtcgatgcctcttttatatgcgtgcgcacatgactaagcccccagataaacaggtggcttgtagtatgtttatgagattaattatagattattacatgctagccatgcggccatagcttttttgcctgatgctggtagggactcggagaatactcgtgcatctttgcggattctaggaatatcaatgcccgcattacatagctctgcacagtggcccacaagccagctttcaataacggtcggatctgcctctaggtgaaattgcaatcctaaaatatgattggcaatcgaaaaggcttggttaggacagaggtctgtttcagcaaggcgaacggcgccttctggaatgtcaaattcatcgccatgccagtgtagaacaggcgtattgcctaagagggctagtggtgtatgttgcccttcagcagtaaaacgcaatgggccaaagccaatttccttcttaccatggctcatagggcccacatggccgcccatgatgcgggaaataagttgcgctccaagacagatgccgagtaatggttttttactatcgatgcggtccttaataaacttgatttcatcggtcaaaaaaggatagatttcttcgtcgtatgcgccaataggggccccacaaacgatgacaagatctgccttagttgcatcgtactgattaaagtcagcaaggggggcctcaatatattctaaggtaaagccgcgttctattaataatggttctaaaatcccggcgttttcaaagtggatatgacgtactacataggctgttttactcatggttcctccttataactacgtacaactatctagtgctagtatatcatattctatattggcttgtccgaacgccgtgtacaagatgttgcacaatacttggtaaataatggtgtagatgctaaccgtttaatcggtatcgctaatggtgatgctaaacctgttgctactaatgcaactgcaaacggcaaagctgaaaaccgtcgtgtagacgttttcattcaccgctaatttgagctttctcaatttaatctaagcccatacaagtccatcttttcgtctctctatatattttgagtgcgataagatggacttttgtgttatactaaatctattagaaatactactgtacatatgtaatctgatcgttgtcatatagctttcatttacattgtgtacaatacttaccatgtgtttagtaaaagtgagttattagtatggaaaaatttaaatattataaggagcttatcggcgcgattatccttgcaggactcatgatattggtggccttgcgcattagcgatatagcatcgggcatcgatgcattgataacggcctttgtaccgcttatcgtaggtgcctgcattgcctttgtcctcgatattctcgtcgtccgctatgaacgttggttatggccgcgtatcaaatcggggtggcggtataagattcgtcgtcccttgagcattatcctatcctttgtgacgattagtctcattgtgtactttattgcccgtatggctgtgccgcagttagtgcattccattacacttatcgtgtccgcagcaccgcagctatatctagactttcaacaatggatttatcatttaagtaataccgttccattggcctcgaaccctacggtattaaataccttgaatggtgaaagtatagttaactatacgcgtgaatgggggaccaagggtggcacctatgtggtgaatacgatgggcacgattctttcgtggaccgtaaatattgcattaggtcttatctttgccatttacatgctactcgataaggaacgcctcatgtcgcaaggtaagcgtattttgaaagcctatgcatctgatacgtgggtgaatcgtgtaacctatgtggccaaggttgctgttcaaacatttagtagtttctttgtaggacagtttatcgatgccttgattttaggtatcatggttggcgttacattatggatttgtaatatttcctatgctacgaccattgcctgtgttattggtctcaccggtttaattccattagtgggtatatatgtaggcggcttgatgggggccgttatattgcttaccattagccctatggatgcgttgatttacgtcatcattttagaagttttacatcaaattgaaagcaatgtgatctacccaaaaatcgtaggtaattctgtagggttacctgggttatgggtctttgccgctgttatcataggcggtagtttgatgggtgttacaggcatgattataggcgtgccattagtagccacttgctataaattgctgatgaccgacgttgaagaacgtttagcctctaatgaaggcttatagcatttattagctgtaatataaataaaaatacaagtttgtagaatccgattactattgggaggattataatgaataaaaaattactatctttggttatgactggtgtgttggccgttggtgttttttccgtagccacaccgtatgaagcacaagcgcgtaagactaaaccagaaacaagcacagatattacaattaaacgtgcacctggtcaatctgtggttatgacaatgagcgaaattggtacgattttccaaaatcgtttccctaatgcagcgttacactctgtagaattgaattccaatgatttggcctatgcttacaaagtaactggatatagtaaatatcacgaatacaaaatgaagattgatatcatcactggtaatcaatccgatatgagcgaaggtggcaaacctaaacgcgttattggtgaaatcttcaacaaagataaagttatcgaaccatctcaagcagaagcagctgctaaagcgcaattaggtgcagatgctgttatgaagggctggaaggttgaagctcacaatggtaaagttaattactatgtaacaatgcatcaaaatggtaagaaaacagtagtgactgttgatggtaatacaggtgcttacattgaacaaagtaaagcaacaaaattacctccagaaccagatcaaggttttgacaaacgccgtacgaacctcgtatggggccatgatatcgttatggataaaaaataatataaaaaatagggagtcaatatctaatgatgttgactccctatttcattgtacgccgaataggcatgactaaacccccagttaaactgggggtcggtaaaaaattcttagagaaaaggaaagaacctcctagtggtaaaatgaagttggtctggcaaccacaacatttcaacataggaggttcaatgtcaatgaatgacgtaaaaagcttatcacatagtaaatggagatgtaaatatcatattgtttttgcaccaaagtatagaaggcaaataatttatggacggataaaagctgatgtaggtaaaattttaagagatttatgtaatagaaaaaatgtagagattatagaggcagaatgctgtccggatcatattcatatgttagtaactattccaccacatttaagtgtatcaagttttatgggatatttaaaaagcaaaagtagcctcatgatattcgataaacacgcaaatttaaaatataagtatggaaatagacatttctggtgtagaggatattatgtggatacagtgggaagatacgaaggagcgataaaagagtatattcgcaatcaattacaagaagatatagcacaagatacattaaactttaaagaatataccgacccgtttacgggtgagccggtaaaataggcaaaataaaagcccccgagtagggggcagccagtggtaatagagtggttgtcagatcattcaaagccctctttagagggccaccactagagaaagacccttatagggtcagagcaaaccacccgttctacgggtggttatgatttgttaggtacaatcgattaccaacggttttcgtagtacgcttgtgtccacataataacctcgataagagatggatgtggactcattgtttcacctacggtgattacggatctaggatccatattgcgcataataccttttttacgcaatagttttgtgcgctcagatgcgatttcttcattgatggctgtcaatggggttacaccgctgttcataaggttaacgtatggttggaataggatagaggcttgtggtccgattacgtgaataccaaggatatggtttgtatctttgtcgaccacgatttttacaaagccgtcatttacatcaccaggatcaatgcccatagcatagccttttgcagtagaggaatagaagttttggcctacgcctacattgtaaccagccttaattgcttctgcttcggtaagacctacgctaccgatttcaggataggagaaggtaacttttggcaacacgtcgtagcgggcccaacggaaatctgcttcatttttggcaaagtaaagattatgtgcaatgatatccgcttcgtagtttgcgcgatgacggaatgcaggttcgccgttcacatcgcctaacgcatagatgccgtccacagatgtttcaagaaactcgtttgttttaatccagccctttggccatgtttcaatacctgtattttcaaggtgtaactcttcggtagcagggcggataccagcggctacaagaatttcttccaccttagtttctgtgatttcacctgttgtacgatcttttgtaacgacaacttttaagccatcttcttgacgaacctctacggtatcttgatttagaattacgttaataccacgttctctataattgttaaggagatgctcggacatatccgcatcttcctttggtactaggcgtacattatgctgaataattgttacgtcggtaccagcagagtcaagtacatgagcgaactctacgccgataggaccagcgcctaagacggcaagggatttgtacggttgtttaggaaacttgtcgccaaataaactttcactagaaaggaagcctgcctcttttagaccaggtacatttggaatattactgtaaccaccagtacctagaataatagttggagctgtgatttctacgatgccagatccatcgttaaggtggatgttcatcaccttatcggacacaaagcttgcagcaccgcgatatacatctacgttgtcatacgcgttatagtaatcatagatgcctgcagacttgtcaatcatatgccatgtacgtttagctacagtgctccaatccattgttgcatcgccaacattgacgccgattttgccgaactcttttacctcttgtacagcattcgcagctgttaccataaccttcgtaggaatacaaccacgagttaggcatgtgccaccgaatttacctttttctatgatagctacttttttacctgtttttatagcagcgtcagcaacgatggttgcaccacctgtacccactacaataatatcgtattgtttcatgttgattcctttctatatatatctagtaatagttattattattaaatatattataccctattatattgaaaataatcaatatagaaaatatattgtttttgttattagtgaaagttggcgcaagggtaaactttcacaaaaagaaaagacgaccccatggatcgtcttattctatatgatggtttaatcccagttttcgtgatagccacgttttgcataatctgcagtagcagtgaagagaatatctgtactggaattgagtgctgtttctgtggagtcttgtaataccccgatgatgaaaccaacgcctactacttgcatagccacatcgttggagataccgaatagggaacatgccaacggaatgagaagcaaggagccgcctgctacgccagaagcgccgcaagcgccgatagtagcgataacggatagaaggatagctgtaggtacatccacgatgatgcccaatgtatgagcagcagctaatgtcataacagtaattgtgattgcagcaccacccatgttgatagtcgcacccaatggaatggatacggaatacatatcagggttaagtttcaaacgtttagccaagtcaaggttgacaggaatgttggctgcggagctacgtgtaaagaacgcatagatagcagattcgcgcaaacatttgaacaccaatggatatgggttacggcgtaagtagatgaaggataaaagtggattgattaccaaggcaacgaaaatcatggagcctaagagtaatacgagaagttggaagtagctgataagtgcttcgataccatttgttgcgatggaatcagctacaagacccatgataccaagaggtgcgaagcggatgatccaacctactacagtcgtaattgcttgagagatggattccattacctcttttgtattcataggtgcatgacgtagagcaccaccgatgataagagcccagcctaaaatgccgatgtagttagcggacattaatgcttttacagggttatcaacgatattcttgagtaaagttttcatgacttccgcaatgccttgtggaggcgctgcatcagcggcactagctgctagatgtaatgtagttgggaagaaccagctcacgagtacggcaagtgcagcagaaaggaatgtacctaatagatagagcgtaattacggagcccatacctgttttttgtccggagcgatgtttactaatcgccgcgatgactaagaagaatacaaggattggtgcaatacctttgagggcaccaacaaataatacccctaatagcgataattcgtttgcaatatcagggacatagagagccgtcaaaataccgataatcataccgatgatgatttgttggatgaggctgactctattaatggatttcataaatcgattcataatagactccaatacttaattagactacataaaacaatgaattctgtcgtttatcgaagagaaataataaatcctcatagaaaagacatatgtcattatataacgaacattgttataattcaatagataaatactaattatatgatgcatttttttctatgtgaacattttgtaattctttgtatatatagtatatatattagaattcgtctaagttctagaatgtcatcgttggttatggtatactgtcaacatgtgatattcttgattatgaaagtgggtaccatgaatactaaagaatttaacacgtatgaagacaaagaacaatttgtgcaaggtgtattttctaatattgccaaacattatgatttgatgaatacattgctcagctttgggcaagactatttctggcgtaagttcgccgttaaagaaatgaatattggaccttatcaacatgtgctggacgtagcttgtggtacttgtgtatttacgaaagaagcattgcgccaagagccaactttgacagtagaagcattagactttaatgcagaaatgttagagcaaggtcgtgagcgtttggatcaagcggatttgttagaccaagtgaacttggtccaaggtgatgctatggcattgccttatgcggacaatacatttgatgcggctatgagtggctttgcaatgcgtaatgtacctgatattaaacaagtgctatccgaaatgcaacgcgttgtaaaaccaggcggcaaggtggtagtcttggaattggctaaaccaagtgcatttgggtttaagcaattatataatttctacttctcctatatattacctattataggcaaattaagtaaggataattcttcctatgcctggttgcctgaatccttgcgtcgctatcctcatcaaagcgaaatcttagaaatctggaaatctctaggttatgaaaatgctacctatactgaattaactggtggcattgtggcggttcacgaaggtgttgtgccagaatccactacaaaataatacaaaaataaagaccgtataacatagttagtatcgtatgttatacggtcttttgttatgtttgttgtttgaaagtgattgattatagaccatagtcgattatgttgctaaaacgtaatggacatagtatgtaactaacaatctataaacaatagttgttattgtagatagtatacaatatctgcatcttgagatacgattaacgatcctttttcaacaggtgtagaagtgctaagatttgcagcaagcactttggcactgcgataatagccttggtcgaatgtacttgtttctgtgttgctaatgtttacagtttttacaggacctaaggtgcggcctagagcagcagcaattacctcagccttgtgttggccgttttgaatggcttctgtagttaaagaatcggatagctgttgagatgtgtcgttttggaatgaaaggctgtttatgtcatttgcaccagcattgacagctgcgtctacgaccttacctacactatccaagttattgattttaaccgttacaaggttggatactctatatcctgtattaacgcgtttgccttcttggtaatcattagtaggattgattgaaatattggacgtgtaaatgtctttttttgcaacatttaaatttgaaagtctgctaataaggtcgctcatgatgcgatcattatttgacttagcggcattgatatttgtgttttcacttgtaatgcctagtgtgagtattgcataggtaggcgccacagagcgggaagcctgacctgtaacatggatttcagatgtatcaaaagatccttgtggtgctgcaaagcttgctgtagccacagaagcacaaatagcagccaaagcaactgttttggtgaataagcgttttgagaatttcatatatctctccttatatagtattaaaaaaacgggggaaatacccctgaaatatgacatgtatatctttataagtatggtattcatgtatatcatcgtaagttaagtatattgtacaaaatagattgcgtaaaatcaatatattttattgaaaaatgagttaaaagtgaaattttgcaaaaatgagaattaggggttgcgtaggtatgtggtttgtactataataaccatacagtcgttgaggcgactgtttcttaatgaggaaacactagatacaatctagattctttgttagttattttggaattttatgtaaatccctcacatagaggtaattacaaaattctaaaaaagattataaaaagtgcttgacactgaatggtcaacatgatattataatctagtcgccagttggtgaaacactttaaacgaaagtgcttcagagctagataatatctggtctaactggtacagatctttgaaaactgaacaatgataggtaatcaatcatatgattgaacataagccagagtgcgggttttgacatagtcaaaaccaaccataattcaaagttacttaaatgtaacgacaacacataatgagctattcaaatagcttcaagatatcttggagagtttgatcctggctcaggacgaacgctggcggcgtgcttaacacatgcaagtcgaacgaagagcgatggaagcttgcttctatcaatcttagtggcgaacgggtgagtaacgcgtaatcaacctgcccttcagagggggacaacagttggaaacgactgctaataccgcatacgatccaatctcggcatcgagactggatgaaaggtggcctctatttataagctatcactgaaggaggggattgcgtctgattagctagttggaggggtaacggcccaccaaggcgatgatcagtagccggtctgagaggatgaacggccacattgggactgagacacggcccagactcctacgggaggcagcagtggggaatcttccgcaatggacgaaagtctgacggagcaacgccgcgtgagtgatgacggccttcgggttgtaaagctctgttaatcgggacgaatggttcttgtgcgaatagtgcgaggatttgacggtaccggaatagaaagccacggctaactacgtgccagcagccgcggtaatacgtaggtggcaagcgttgtccggaattattgggcgtaaagcgcgcgcaggcggattggtcagtctgtcttaaaagttcggggcttaaccccgtgatgggatggaaactgccaatctagagtatcggagaggaaagtggaattcctagtgtagcggtgaaatgcgtagatattaggaagaacaccagtggcgaaggcgactttctggacgaaaactgacgctgaggcgcgaaagccaggggagcgaacgggattagataccccggtagtcctggccgtaaacgatgggtactaggtgtaggaggtatcgaccccttctgtgccggagttaacgcaataagtaccccgcctggggagtacgaccgcaaggttgaaactcaaaggaattgacgggggcccgcacaagcggtggagtatgtggtttaattcgacgcaacgcgaagaaccttaccaggtcttgacattgatggacagaactagagatagttcctcttcttcggaagccagaaaacaggtggtgcacggttgtcgtcagctcgtgtcgtgagatgttgggttaagtcccgcaacgagcgcaacccctatcttatgttgccagcacttcgggtgggaactcatgagagactgccgcagacaatgcggaggaaggcggggatgacgtcaaatcatcatgccccttatgacctgggctacacacgtactacaatgggagttaatagacggaagcgaaaccgcgaggtggagcaaacccgagaaacactctctcagttcggatcgtaggctgcaactcgcctacgtgaagtcggaatcgctagtaatcgcaggtcagcatactgcggtgaatacgttcccgggccttgtacacaccgcccgtcacaccacgaaagtcggaagtgcccaaagccggtggggtaaccttcgggagccagccgtctaaggtaaagtcgatgattggggtgaagtcgtaacaaggtagccgtatcggaaggtgcggctggatcacctcctttctagggagacatacaccgagccaagagcttggatgtcacttaggtcgacactttggcacctaacattgttcggttttgagagatctgtaaatgatttctcaatttaatatgacgtataaattacgcgttaatctaggcgcatgagttgaacgacgtcgccacgtaatggtaattacgtaagacaagtgaaacgaatgcaacgacgagtaacacggaatttatcggcagatttgttctttgaaaactgcatagaagataattattatatatttgtaaggtcatctcttagaatttctaagtaggttgacccgagcacataggaaataattctctgacttattggtgacgtacatgaaaatgtacggctacaaaataaacgacaatgtatctaatgcatgtcatattaacttaagtgaagttaataagggcgtacggcggatgccttggcgatatcagccgaagaaggacgcggtaagctgcgataagctacggagaggtgcaagcaacctttgacccgtagatttccgaatgggggaacccggcagtggttatgcactgtcacccatacctttgagtatgaggagggcacctggggaactgaaacatctaattacccagaggaagagtaatcaaacgagattttcttagtagcggcgagcgaacgggaaagaggccaaaccggagcgggcaaccgcaccggggttgaggacagtcatcaagtgtaaatgaggtagaagaatcgagttggaaagctcagccgcagaaggtgaaagccctgtaatcgaaaccttgcatacatgggactgtatccagagtaccacgagacacgtgaaaccttgtgggaagcaggggggaccaccctccaagccaaaatactgatatcgaccgatagcgcatagtaccgtgagggaaaggtgaaaagaacccctggcggggagtgaaagagaacctgaaaccgtatgtctacaaacagtcgaagtctgtatatatatcaggacgacggcgtgcctattgaagaatgaaccgacgagttactgttgctagcgaggttaagtggaaaacatggagccgcagcgaaagcgagtctgaacagggcgttcagttagtgatagtagacccgaaaccgtagtgatctatccatggccaggttgaagcacaggtaaaattgtgtggaggaccgaactcgtgagcgttgaaaagctttgggatgagttgtggataggggtgaaatgccaatcgaacacggagatagctggttctccccgaaatagctttagggctagcctcgaggttgagagtataggcggtagagcactgatcgggctaggggccataccggttaccgaacctagtcaaactacgaatggctatacttatactcgggagtcagacagtgaatgataaggtccattgtcaagagggaaacagcccagaacaccgactaaggtccccaatgtcatactaagtggcgaaggatgtggaatttccaaaacaaccaggatgttggcttagaagcagccaccatttaaagagtgcgtaatagctcactggtcgagagactctgcgccgaaaatgtccggggctaaagtatgaaaccgaagtcgtgtcatatacagcaatgtatatgggtaggggagcgttctcatcggattgaagcagtaccgtaaggagttgtggactggtgagaagtgagaatgtcggtatgagtagcgaaaagaatggtgagaatccattccaccgaaagcctaagggttcctgagcaacgatcgtcgtctcagggtaagtcgggacctaagccgaggcggaaaagcgtaggcgatggacaacaggttgaaattcctgtaccggtgtgaatcgtttgatcgaaggagtgacacagtaaggtaggtcagcacgcgattggaagtgcgtgtttaagcatgtaggttgagttataggcaaatccgtagctctaaaagctgagatgtgatgacgagctgtttacagcgaagtgattgatcctacactgtcgagaaaagcttctaggtagagacacatcgcccgtaccaaaaccgacacaggtaggcggggagagaatcctaaggtgcgcgggaaaaccctcgttaaggaactcggcaaaatgcctccgtaacttcgggaaaaggaggactcatgtagtgtgaagggcagtaacgcgtggagcatgaatgagtggcacaagagaggcgcaagcgactgtttaccacaaacacaggtgcctgctaaagcgaaagctgatgtataggtgctgacacctgcccggtgctggaaggttaagaggaggggttagacttcggtcgaagctctgaattgaagccccagtaaacggcggccgtaactataacggtcctaaggtagcgaaattccttgtcgggtaagttccgacccgcacgaaaggtgtaacgacttgcgcactgtctcaacgagggacccggtgaaattgaagtacctgtgaagatgcaggttacccgcgactggacagaaagaccccatggagctttactgcaacctaagattgaacttagttaatgaatgtacaggataggtgggagacttagaatctagggcgccagtcttagaggagtcgttgttgggataccaccctttgattaattgatttctaacaggccgattaacaaccggctggacagtcttaggcgggcagtttgactggggcggtcgcctcctaaagagtaacggaggcgcccaaaggttccctcagagcggacggaaatcgctcgaagagtgtaaaggcagaagggagcttgactgcgagacggacaggtcgagcagggacgaaagtcgggcttagtgatccggtggtgccgagtggaagggccatcgctcaacggataaaagctaccctggggataacaggctaatctctcccaagagtccatatcgacggggaggtttggcacctcgatgtcggctcatcacatcctggggctgaagtaggtcccaagggttcggctgttcgccgattaaagtggtacgtgagctgggttcagaacgtcgtgagacagttcggtccctatccatcgcgggcgcaagaaacttgaagggggctgctcctagtacgagaggaccggagtggacgaaccgctggtgtaccaattatcctgccaagggtacagttgggtagctacgttcgggacggataaacgctgaaagcatctaagcgtgaaaccagccttgagatgaggtttctcatagcataagctagtaagatcccatgtagacgacatggttgataggccaggtgtggaagaaccgtgaggtttggagctgactggtactaatagatcgagggctttacttaatacaataagcagaaaatgtgcaacaaatatatataaccttctatgtggttttcagagtacaaactctgacagattcagtggcgatagctacgagggtccacctgttcccatctcgaacacagtagttaagctcgtaaacgccgaaagtacttggctggagacggcctgggaggataggaagtcgctgattaagttaaaaaggctaaccgtatggttagccttttttgttatataagcctgcatgtagagtccgaccagcggacctgagaaaagtagagtatggagtgatagaggcgcatagagacgtatgtgattcacatatcagatttaaatatgcacaaaaaattactcattttacaatttgtttaaattctattcactcataattcatatagaatctttatactatcaatagttgattgagatcaactaggaaatggaggtctactacttaataacttttatctgtcccttttacaaataatacaaacaacacaacacaaaacaatacaacacataaaacaacacttaaatacacaacaatactctccctgtgtataaaaaacaatacatatacaaaactctctaattatatataccatctcccgtatatataaagataaaagttaagtagacaaaaagagcccgaaagggctctttccttttttcgtataaatagtattgttatagaataattatatgtttgtatacatgaaagtgaggggataattatctttgtactttgatagtaatttatatattatataaaaaagatggaattcttaaatatcttagaattgccttgacagatgggggcgcttcttggtattatattcaagtatcaagtacacttgatgtgcataggggtatagctcaattggtagagtagcggtctccaaaaccgttggttgtgggttcaagtcctactgcccctgccaaactttagagctgcgaccttcgggtcgcaattctataaaaaagttacttaaaaatattaaaataatgcttgcaaaaagctagtcattatgttaatataatcaagtaccaagtacatgactcagtagctcagctggatagagcgtttgactacgaatcaaaaggccaggggttcgaatcccttctgggtcaccaaactaaaactcacacgaacgtgtgagtttttttattattgtctttagactggttcgcgacgtagtcgcgaatcataaaaccacccgctatgcgggtgcggcaacgaaagttatacaaaaaaatcaccttgcttaagtataatgtaggtgttcaagccgcattatatacaaaagaaaggtgattttatatggcaacaaagacacagagccttgcgcacacaaaatggttatgcaaataccacatagtatttacacctaagtatagacgtaaagttatatataatcaatacagaaatagtttacgtgaaatactgagacgtttatgtgaatataagggcgtcaagattatagagggggagcttatggcagatcatgtgcatatgctagtgttaattccacctaaaatatcagtttcatcttttatgggatatttaaagggtaaaagtgcgctaatgatgttcgataaacacgcaaacttaaagtataaatttggaaatagacacttttggtccgagggatattatgtaagtacggtaggattaaatgaagctaccgtaaaaaaatatatacgtgagcaagagttacatgaccaaatgaaagataaacttagtgtaaaagaatatgaggacccttttaagggtagcaagtaatacatatcccctttaaggggaccgttacgagtcaatggctatgcggcttgaacgtagtgaaagccagcgcctttagacgctggcctagtactacgggcttatagcccgtgagcaaaccacccgttttacgggtggttctgatttgtctaaatatgatttatagagcttatagatctaaactaacttaaaggcctcgttaggtaggctttttataattagaacaggcctgttctaatttgtagggaccctatatagataggccatcttagagatagtacaggcctgttctaattcgtagggaccctatatagataggtcatctcagagatagtacaggcctgttctaattcgtaggaccccatatagataggccatctcagagatagtacaggcctgttctaatttgtaggcctcatatagataggccatctcagagatagaacaggcctgttctaattcgtaggacctcatatagataggccaactcagagatagtacaggcctgtactaatttgtaggacctcatatacggaggcttaacgataacaaaacggagctgctttgtactaacagctccgttttgttagttggatacttcttttaattgtccggcagcaattgccatatttttagaatagatggcttgcatataaccataggtatctggttttaattcttttagcttagggtttttcttaatgtttctacgtagaatttgacctgtacgagcatcaattagattgatttcgtcttgtgtccaatagatggtatcagcatcttggttgaaatagtaatgattgatatattctgtcatgtaatacatggcaccttgatggctatatgttttggcgatgatttcgtagttattgccttcgcctgcacggacgatgacgcgattatctgcatagtattgttggccgttcatgcgatacatataggaatagcctctagcgttctctaggtcacctatattaactgcgtaggcactacccgttaaggcaaggaatgtaagcgttagaatagctaattttttcatagtgtggtgattgctccttatttggcatgaggctgatctgattcagcgacgacgttgaccacaacttgttggtcggatggtatttgactcatgataaccggcattggttgttccatggcttgagcaatgccttttatttgtcgaatcgcaactggtacgggtgtagaagatccgtcttgaaagttttgttctagtgtattgatttcgctaactgttaaaccagcttttgctgcaaatgtttcttgtgaaagttgatgttcctcgcggaatgcttttataatgtctccgatatacataatgacctccataatgtaaattactctatcattatacatgaaagcatgatgagataatagatagattgaaatatagtcttttgttattagtgtattataaatatttatttatgaaaatgtaaaaaaggtttgacgaaagtaacatacggtgataatataaacacatagacaacatcatatttgggaataggtgctgaaaagcataatagagaagctggttaaaggccagcacggtcccgccactgtatggttgagcgagtctaattaagtcactgggaaactgggaaggctagatgagcgttgacaccgagtcaggagaactgcctattcaacattcaccatttgacctacgagtgatagggaggagaagtttgagactccctttttacgtacccgtaaaaaggatttttttgtgtaaatgatgttttgtagcacacaaattagaatcttttcattgttagagcagtcatggtgaatataccgtttggtattatcagcatggcttttgttatgtctgttaatatatttattggtaaatgtagggcatgcatttattcatcatcatcctaaaaagagagatggtcctagcacctaggttaggtgtttggaccatctctttttttgattcttggacctttagagttgatagatacatagacatcttgaaattgttaattctatatatatgatgaagtcttataaaaattacaaaaaatgattgacgtcatatataataagtggtattataatttcagtcggtacgcgggagtggcggaattggcagacgcaccagacttaggatctggcgccttacggcgtgggggttcaagtcccttctcccgcaccaactatatttgcacctgaaggtgctttttttttgcccatttacatctattcaaggaaacaggtgtttttttgcatatttgtaaatatgctataataaattatcagtactattgtacttgtaacagatatgtttaagatattatatagataatcattatatatggtgcagtatggatacttcaattgacacactgctttcacaaaacccatctatgacagatgggctaaaggcgtttcgccaaaagggaaagtcagttatatatggtttaagtggatcacaaaagtcattcctcttaagccgtgctattccagaggaacaagtacaatctattattatcgtggtgcacgataaagaacataaagaattgtgggaacgggatttggcgtttttctggcctaatgtgcaggtattgccatttcccattacagaacgtgtagaatttactaccgtagctcgtagccttgaaggacaaggggctcaaatgcgagcgcttagtatgttggcctggaatcgtcctgttgtagtcatcgctacaatagaagaggccacgcaatatgtagtgagtcctcaatatgttatatctcaaagtgtacatcttgaggtttctcaatctatagagcgagatgagctgttagaaaaattagttaaaattggatatgaacgcgtagaccaggtagaacaacgtggtcatttttctgtgcgcggagatatttttgatatcttccctgtgaatagtgatgatccaatacgtatggaattctttggcgatgaaatcgacacgatgcgccatttctccgtagatacacaacggtctattgaaacggtagatgcctatacggtaacaccattcttcttaactagtgatgacgcagatagtacattgctatcttatgcaaaggatggacttatcatttatgatgaaccggtgcgcattcaagaagcgttgaagaaattcttaaaagaagatacaacacatcgcaagcaacattgtgaatggtctgaattacaacgctctgtagatgctaagattgaggtggctttcacattcatgcaacagcgttctatagggctagctggattttatccgattggcattcaaggtaaaacgatgacgagctttgagcgtcaaattccattgttgatggatgaaatcaagcagtggcaaaagctgggcaatcaagttgtgcttgtgattaataatttgcagcgccgtgaaggcatagaaaaggctttgcatggtgatgccattccgtataagctttgtgaaagctgggattttgagcctaatacggttcacgttatgcaaggcttattaactgatggctttgaattaccgcatagccatttagtcgtcgttgtagaaggcaatatttacgggcagcaaaaacgcaaacttcgcaataagcctaaaaagggccaagaaattaattatttcacggatttatcggtcggcgattacgttgttcacagcatgcatggtatcggtaaatatgtgggattaaaaacgattgaaacagaaggtattcatcgagactacattgaaattgcttatgccggaacagatagactgtatttgcctgctagtaatttagatcaattgcaaaagtatatcggcaatgaaggcgatgtacctcgcattcataagatgggtggtagcgattggcgtaaagcggttacaaaggcacagaaatccattgatgatttggcggataagctagttgaactgtatgcgaaacgggaaattacagaaggatttgcgttcttgccggaccaaccgtggcaacaagaatttgaagatgcctttccttatgaggaaacagaggaccaattacaagctacgcgagaaattaaagaatccatggaacgaccaacaccgatggatcgcttgttagcgggggatgtgggctttggtaaaacagaggtcgctatgcgtgccatctttaaggccgttgtgagcggtaagcaagtggccgtattggtaccaactactgtattagctcagcaacattaccaaacgtttttaaatcgatttaatccatttggtgtaaaggtagatgtactcaatcgattccgttctacagcggagaagaaagaggtgctaaagggcgtcgaaaatggttctatcgatatcttaatcggcacacattccttgttaaataaaaaggtaaaattcaaagatttagggttcctcgtcgtcgatgaagagcaacgctttggcgtagcacaaaaggaaaaatggaaggaatgggctaataatattgacgtccttaccttaagtgcgacacctattccacggacacttcatatgtctcttgtaggtgttcgtgaaatgtcggtcattagtacacctccagaggatcgactaccagtacagacctatgtagtagaatacgatatgaatctcatagctgatgcaattaaacgagaacttgctcgagggggacaggtttacttcgtgtataatcgggtagcatcgattaatcatatgggtgaactattagaacaggccttgccagatttgcgttatgctattgcacatggacagatgacaggccgtcaaatcgaagaaattatgaccgatttctatgaaggtcattatgatgtattgctcagtacaagcatcattgaaacaggccttgatataccaaatgccaatacgattatcatatacgatgcggatcgtttaggcttatctcaactctatcaaatgcgtggccgtgtaggtcggtctagacgacgcgcctatgcatatttcatgtatcgacctgataagatgctttcagaagcggcagaaaaacgtttaaaagccatcgaagaattcacagaattaggggcgggatttaaactggctatgcgcgatttggaaattcgaggggctggtaatctattaggttcacaacaacatggtaatatcgcatcggtcggctttggcatgtatgtatctatgttagaggaagccattgcgaaagcacaaaataaagaggttgtcaaagaggtagtaccagatcctgccattgaccttgaaatcgatgctttcatagatgatgcctatatcaaggatagtgcgcgcaagatttccgtatatcaacggatgttacaaatcaagaataaagcgcagcttgatgatttgacggatgaacttatcgaccgttttggtacaccaacggatccggtagatcgtttactacgagtcgctcaaattaaggaacaggctcgtttgttggggattaagagcatcgttcgtcgcgagggtcagctcatcatccattggcaagatgattcaaaaatggccgattgggatatgggtgctgttcgcgaagatttatggaagaaaatgaagttcatggacacaaaacctgcgtcattatacatcagtttgaatggattaaaggaatctattttaacgattacagaagcggtgatgaaggagttgtcaaagaaatctaaggggggcctatgaaccgatttttaaagggagccatgattttaacaatagctggtgttatcgttaaaattattggtgctttcagtaaggtactcgtcgctcgtattcttggaggcgaggggataggtctctatatgatggcctatccgatataccagattatagttagtatttcggctgcagggattcctgtggcaatctccattatgattgctgaaaaattggcgaatagagatatgcgtggggtacaacaagtttttaatgtatccttacgggtgcttacactagtaggtattatatttagtgtgggactttatgctagtgcagaatggcttataaaatggaacattataacggatccaagggctttaataccgattcaattattatcgccggctattattgttgtcactattttaagctgttttagaggctatttccaaggtttccaatatatggttcctaccgggacaagtcaggtttttgaacaaatatttcgcgtagggtccatggtggggcttgcgtactattttatcgactccggattacatctggccgcaggtggcgctacctttgctacatttccgggcgtattagcgggtttaatcgtacttgtgtatttttataggtctcaacgtagtttgcgtcagcagatgctaagtgagcaaaatgaagaggcccctatagaacgtactagtgcggttattaaacgtttatttgccctagctattcccgtttccatggccaatattatgttgcctatggtatctttaattgatacttttatcgttccaaaacgattgatggatattggctactatttacatgaggcgactacacagtttggatatttgacagggatggcaacgtcattaattggattacctattattttaacgacggctctcgcagcgagcctcgtaccggctgtatccgaagcgcatgcaacggggaataagggtcgtataatcgagcgtgctagtacagcgatgaagattgccaatttatttgctataccggcttgtgtaggtttatgcgtattggcaacgcctatttctcagttaatatatgcaacgcccaatgcaggtcccgttattgccgtgattagtcttagtattatctttttaggatggcaacagattacggctggtatattacaaggattagggcgcaccattattcctatgctgtctatttttatagggcttatggtgaaagctatcttagactatcaattgaccgggtccattgaactcggtattaatggtgctgcatgggctacgaacttaaacttcgccatcgctgccttaattaatctagtatttgtaaaacggtatgtaggtagtattattcaatgtatgaacctattgaaaatcatcatttccgctatggctatgggtggtgctacacaagttagctttatgttccttgtcgatatggttggtaatggcgctgccgtagctatatccatccttattgctttcattgtatatatactatctctttggattactaaggctatcgtaatggatgatatgtatcatatgcctgttattggaaaacgattgcgtaaacgccaagcagaggagaatcaaatctatgaagaccaatattgatatacaacctcttgtagaggtggtacaaaaattatgctctcctaatggatgcccttgggataaggtgcaaactcatgaatcattgcgccgttattttattgaagaaacctacgaagtagtggatgccattgataataaagatatggataatctgcgtgaagagctaggtgatgtattattacaaatcgtgtttcatagtagtcttgctgaaaaatcaggagcttttacattacaagatgtaataaatgacgtaactgagaagatgattcatcgtcatcctaatgtatttccagaagaaaatcctgacaataaaggaaaaacatacacttgggatgaattaaaagcacaagaaaagggaaatatacgaaaaagtgtattagatggagtatccaagggtttacctgcattggtggctgctcaaaagctacaagataaggccggaaaggtaggttttgactgggatgagctggagccaatttgggcaaaagtaagtgaagaaatcggtgaatttaaggaggctgtggccttaaaagatagagaaaatatggaaaaagaggctggagatgtgcttttttccttgattaatctctttagatggtataaaataagcggtgaaaatgcactgaatcgcacaaacactaagttccgacagcgtttttcacatgtagaagcttgtgttaaccaaagcgatcgctcatgggaagacttttcattagctgagctggatgctttttgggaggaggctaaagtgcaggaaaagtaacctagaggtatgttagtaatctcgggtattgtatttttaaggaggttctgtcatgaataaaacagaattaatcgcaagtgttgcacaaaaaactgaattgactaaaaaagacgctgaaaaagcggtaaaagctgtattcgacacagttgctgaagaattagctgctggtggtaaagttcaagttatcggcttcggtactttcgaagttcgtgaacgcgctgctcgtgaaggccgcaacccacaaaacggtaaaactatcactattaaagcttccaaatctcctgcattcaaagctggtaaaggtttgaaagaacaagttaacgcagctcctgcaaaaaaacgcaaaaaataatctgaataagatgtaaaagagacccgatagggtctcttttttcgtctatgttattttttcttgtttatgtggtataatcacaaggaaaggatagattatgactacagaacaatcacggaaggtcctcattgtatctgcctctattgggacaggtcatatgcaggccgcaagggcgatagaagaatattggaaattaaaagaaccacatgcagagattagccatgtggattttcttgatacggaaactatgtcagtagaacatcttatcaagggtacatacattaagatgattgacgtatttcctatgttatacgatatgatttatcgtgtatcaaagggggagaaaaaagggactattttacaaaccgttttgtcctacattcttaaaagtcgtatgttgaagctcattcaacaagagaagcctgatgtgattgtattcacgcacccatttccgtgtggagccgcctgtattttgaaacgccaaggccatattgatgtcccgttagtggccatcctaacggatttcagtagtcaccaattctggatttaccctcaagtagatacctattttgtcgctacagaggacatggtaggagaaatgacggccgtcggtattgagcagaataaaatccatgtatccggtattccggtgcgtagatcattctttaaggatgccatcgatcactatgaaatgaaatcacctgttaaggttctcgttatggggggaggattaggcttaggttcattagagattgcacttcaacatttagatgcggtcaatggtattgatgagattactgtcgtagcgggacagaatacatcgctctatgagtctctagtaaatcttagtgtacggatgaaaacgaaaaccactgtatacggttatacatctaatatttctgagctaatgcactcagcgactatgctcgttacaaagcctggtgcattgacctgtatggaggctgttaccattgggcttcctatggttttctttaatgctattcccggtcaagaagaggctaatgcggagctattagaagagcgaggttgtgcgcgttgggctagagatatacataatttagaggacgtagtggctgcgttgttaatcaatccgccacggttacaacaaatgtctgaacaagcacgtgcttggcatgtagatggtgctgctaatatcgtaaacgaactcattcatattctagatacaaaaacagatgcactttctactaagtgcgagttagaaatactataaataaaaaggtcatccacgaaactaatttacctaccatatgtatggattaggtaaccattagtttggggatgacctttttattattcgcgtgcgaaattattgatagtttttaatgttttctgtacgtatcatttgtaatgcgtttaagaaatcttctgttgaagtatgttcttccagtagtgcttgtaattgatgagaatcattaaggcttacactccattggaatgaatcggtatcgtcatatacattgaatacgattggggtatcgagtgtatctggcatatgaccatcgtcgtcggatacagttgcataagtaccatcgtctagtagttcaacaaaaagtgtatcataaccatcaaagtcgataatttcaaaatctagagcatcataaaaatctaatattgcatctgttgccatgagaacctcctaatagtatgtacttatcatgttggattactgtctagttatctatctgtattctactgatgcggtgtatgactgtcaatgaaaatctgtagtataataaataacataatgataatagaggagtacgggtatgaatgtaatttgtttgcagaatatagagaaatcgtatggcacacgattgttatttaccgatgtgtccataacatttacaaatcaaaaacgattgggacttgtgggaatcaatggaactggtaaatcaacctttttaaagattttaacaggccagatggagtgtgataagggtactattgagcgcaatggcaaggctaccatccattatttagcacaaacgccaagttttgatgaaggtaataccttattggaagccattttagatggtgaccatccgcgattacaaatggtaaaacgatttgacaaggccagtcgcgattaccattatatacaagaacaggacgtatctgatgaacgtattgagcgtcattatatgcagtgcttagaagaaatggatacccaagatggatggcaagtagagcaagaggcgcgtatcattttgagtaaattgggctttcacgacgttaatatgtcagttagcttattatcgggtggtcaaaaacgtcgattggcattaggacaagccttattatacccttgtgatttactcctcttagatgaacctactaaccatttggatgaagatagcatcgagtggctcgaaacatatttaagcaatcgtcaaggtggtcttttaatcagtactcatgaccgatattttttagactccgtatgtaatggtattttggaattatccaatcgtcacatgtatgagtacgaagggaattatgaaaaatttattgaattgaaagcagaccgtgaggcacgccaagctgcaaccgaggagaaacgccgtcaatttttaaagcgggaaatcgaatgggtacgccgtggtgctcaagcccgtagtaccaaacaaaaggcccgtttgcaacggtatgaaacgcttaaaaatatggagaaaactagacgtcctgatcaaatggatccgattgctttaaagactcgattgggcaagactatttttgatattgaacatttatcctttgattttgatggacgccctatggttgatgattttacatatcacgtggtgcgtcatgaccgcattggtatcgtaggtcccaatggggttggtaaatcgacatttatgaaaatcatcgatggcacctatgagccagtatcaggaactattggcaaaggcgagactgttcgcattgcacactttaaacaggaattacctgaatttgatgaaaatatgcgtgtccttgattatataaaagaggaccattcctatatgtcgcttggtgatggtacaacgttaagtgcaggtcaaattttagaacgctttttattcacccctgaattacatggtgtgcctattcgtaaattatctggtggtgagcgtcgtagattgtaccttttaaaattgcttatgagtgcgcctaatgtacttctcttggatgaaccgactaatgacttagatatccctacactagaggtattagaggattttcttgattccttcagtggcgttatcataaccgtgtgccatgatcgctatttcctagaccgcgtggtagataaattatttgtatttacaggcaatggtcgtatcgatatcgttcacggatcttattctgattataaggctgacattggtgaaagtaacaattcaccattctatgtacctgaacaacagggtactagtactcatagaactgaggcagaatctgattctatggatacaattggtgcatcctctagtactgaatctagtcatacagaaagtcctgtaaagaaaggcctcaataaggctgaagaggcagaatatgcatcgattatggaggaactgccaaaactagaacatcttgttaaaggattggatgtcatgattggccaagccggtacagactatgaaaaaatgcaaaccctcatagctgaacgagaagagacacaatctcaaatcgatacattgactgaacgatggatggaattagaagaacgtctataaatctttgttttatgcgattttttaatacctgatatgcataggaattactttcagaatcattgataaaaatcacattttgtagtataatttcatcgattaacgataacaacgttacctaagtaggaggaaacatgagtaagtatcaatttttagatcgtcgtgtgccaattgaagacggcaatattgcattagtacaagatttatccaaatgtaaaaactgctccttatgtcgtaaagcttgtgctgtagacatgggcgtatttgattattatgatttaacaactaatggggatcatccaatttgtattcattgcggtcaatgtgcatctatttgtccattcgattccatcaatgaacgttctgaaattgatgaagtaaaagcagctattgctgaccctaataaaattgtcgttttccaaactgcacctgctgtacgtgttggcttaggtgaagagtttggccttgatgcaggtacattcgtagaaggtaaaatggtagcggctcttcgtaaattgggtggcgactatattttagatacaaactttggtgctgacatgactatcatggaggaagcatctgagttgttggaacgcgttatcaatagtgattccgtattgcctcaattcacatcttgttgccctgcttgggttaagtttgctgaaacattctacccagaattcttgccaaacttgtctactgctaagagtccaattgcaatgcaagcgcctacacaaaaaacatattttgctgaaaaaatgggccttgatgcaaaacaaatcgttgctgttgcagtaacaccttgtacagctaagaaattcgaaattcgtcgtgacgaaatgaattcctctgctgaatactgggatgtaccagaaatgcgcgatacagactactgtattactacacgtgaacttgcaaaatggttacgtgcagaagaaatcaactttgatgaattagaagattctgcatttgatccattgatgggtgaagcatctggtggtggtatcatcttcggtaatactggtggcgttatggaagcggctatgcgtgcggcttacaaactagcaactggtgaagatgcacctcaaacattgatcccattcgaagcaattcgtggtatggacggtgctcgtgaagcagatgttgtgattggtgataaaacattacatgtagcggctgttcatggtactggcaacttgcgtaaattcattgaacgcatgcgcgcagaaaacatccattacgatttcatcgaagttatggcttgccgcggcggctgtatcggtggtggtggtcaaccacgcgttaaattaccaatggctgataaggctcgtgaagctcgtattgcgtccttgtatactcgtgatgcagaggtacaagtgaaagcggcttgtgataatccagatatccaaaaattatatgctgagttcttcgatggcaaacctatgagccataaagcacatcatatgttgcatactacatttgtgagccgtgcagaagacttaggtcctaatggtgcatgtacacctgctacatgtccaacgtctgtacctaatttgaaaaaagcagcagaagctgcaaaagcggctgcagaagcaaataaataattaattatttataaaattgaataaaaaacttgaaaattcgcataaaatagcatatactaattattgtgagagacaataatataatgattcttagagagaggtatatgttaatgacctggggcggacagagagaaggttctggtcgtagacctcgtatgtacaaacgcgaatgtcgctcgttccgtttgacagacgaggaatatcaaatcctgaaaccattagtagaggctattagaacgcgtacagatgcatctaataagcaacacttagagtacttgaataactaaatattgacatggtgtatgtatataaaatatcttttttgtactcttccaataatagcaactcttatatatgccatgtgaataagcgaaagttagacccttttggggtctaacttttttttgtaaataaatacataaggtataggcattttaactatacctagttataatatgagtatacaagttgtgagtataggaggtgttagcttgttacaagatttattatcagaggataatgtatcgtttcgttatcctgctgagacatgggaagatgtgattcgtcatggtggtcagctcatggtcgatgctggttttacagatcctacatatacagaggctatgattgacgtagttcgcgacatggggccgtacattgtattggcaccgggtcttgctatgcctcatgcgcgcccagaaatgggggctaagcaagtcggtgcggctttggtaacgttagaaaagcctatcgattttggtagcccagaaaatgatcctgtatcagtagcgatatttttatgtgcgccgaataaggatgaacatattcaattgcttaccgatattgcaactctatttgaggatgaagaattccttgatgcagcggtaaattttgaaagcattgaagatgtacaatcttttttagcagaacatcttgatgaagcgtaattttggaggtaaactatgatttccattttaacagtatgtggtaatggcatcggttctagtttgatgttaaaaatgaaaattgaagaaatttgtgctgaaaataatatcgaagcacaagtagaatcaatcgattttaatgcggctcaaggtcgcaaggcagatttaattgttactgtaaaggaattggcagaacaatttgaggacaaggatgtagctattgtacgtagttatattaataaaaagaaaattaaagaagatattttggaacgattacaacaaatcgctaagtaattcatagggggagataattctatggaaatgatattagaattcttacgagatgtattgagtcagccagcgttgttgattggtattatgtcctgtgttggtttaatcgctttgaaacgaccatttcataagattatgactggtacattaaaaccgattctcggctatttaatgcttgctgctggtgcaggtgttatcgttagcaatcttgatccacttggaaaaatgattgaacacggattccatattaccggtgttgtgccaaataatgaagctatcgtagcggtagcacaaaaggtgcttggtgttgaaacgatgtctatccttgttgtaggcttattgatgaacttattaattgctcgtttcaccaaatttaagtatgtattccttaccggtcaccacagtttattcatggcttgtttaatgtctgctgtacttggtactgcaggtttatccggtattgaattgatccttgtaggtggcttcttaatgggcgcttggtcggccatttctccagctatcggtcaaagctatacttctaaagttaccgatggcgatgaaatcgcattgggccactttggtagtttaggttattatttatctgcatgggtagcaaaatatgtaggtaaggcagaggaaagtacagaagatattgagattcctgaaaaatggggcttcttgcgtgactccacgttatctactgcattgaccatgattgtattctatttaatcgccgctattgcagctggctctgaattcgtagcaaccttatccggttctatgagcccatatctatttgcagttatgagtgctatgaactttgctgtaggtgtagctatcgtatattctggtgttcgtatgatcttgggtgatttgattccagcgttccaaggtatcgctacaaaaatcattcctaatgcaattccagcagtagactgtgctgtattctttacttatgcgccaacagccgttgtattaggctttattagctcctttatcggtggtatcatcggtatgcttattctaggtgctgtaggtggcgtacttatcattcctggtcttgtacctcacttcttctgcggtgcaacagcaggtatctatggtaatgctaccggcggtcgtcgcggtgctgcagtaggtgcattccttaacggtttggctattacattcttgcctgcactagcattgccagttttaggtcaattaggtttccaaaacacaacattcggcgatgcggactttgccgtaatgggtcttgtacttggtaatgcctttgaatggattggcatggctggtatttatggcgtcgttgttattgcagcccttgttcttattattcctaacttcattaaaacaaaagggaaagttattaattacgtagaagaagagtaatgaaaacagctgagcaacatagtaatgtcgtaattcgatatatattcttaaccattggcgctataagtttttgccttggtacagcaggtatcgtattaccaatattgccaacagtccccttttatatgcttaccttattttgtttagctcgtggatctgaacgctttcatagaatgtttttggagtcccaattatataaaaagacagttggtgcgtatgaacgcgataaagcattgacgttgcgggcaaagttgtccattttagcttctgtaactacaatcatgctaataggtgcctatttttctagaaatattcctattgcccttatcatcatggcagtcgtatggattgctcatgttatagcattattatttgtagttaaaacaaaaaattaataataatatgaaaatcctcccattagagcatgctttaatgggaggattttttaggtccatcaattatatttagaagatgaatgtatatttcgtattttaataaagattacatgaattattactaaaatgaatttgacaattaatctcaaaataattactattaatgtattgtttataatttatatatatatggtgatattatgaatccacatgctcatatgaaaggacaatcaggggtatgtatagctagacataccgtatttgacggtattgatttgctattccttgatgtaaagcgtgaaacgattcaatttttcgcccaatctcatacaaagacctttgcaattaatcattgtgaagagggccgtattgaatgcaaattcgcatctggagaatacttgtatatggggccaggggatatgtcgctagggtggcatattaggtctgattatcaacatgaaaattacttccctacaaaatcgtttaaagggatagtgctattagtagatgtagaacgagctcagcatgtattagatacccttgtagcagatacacaaatcgatttggctgccatagcaaatcgattttgtgaaaatacagactttggtatgatgatggaggaaaccgagtcggttcgccaaattttttccagtttatataatgtgccagatcctattagatctcattattttaagatcaagattgtagaaatatttttattattatctgtaatctctacagactcccatgaaaaacgagggagttaccgaaagcaacaggtagatattgtaaaagcggtaagtaaatatttgtctaagaatttcgtcaaacgcattaccattgatgatttatctcgtgactttgatgtccctgcatcaaccttaaagcgttgctttaagggcgtatatggtgtgacgattcatcagttcatcaaagaatgtcgccttaatgaggcaaaacgtttactccaagaaacggatgaatccatcttacaaattgccaatgccgtagggtatgaaaacggtagtaaatttacaagtacctttaaggactttgtcggtatgacacctagtgattatcgtagagtataattacatattgtttaactatatctaacaacagtatcaaaatcgtataattttggtcttttcggagtagatatgcataatacactttgctaacatattaaatgtaaatgattttcaatgtcattgttgttagtaaagtgtattttttattactaattataatgatgcatatagttgagtgagattataagaggaggaaacaatgaatcggtggagccgtacaaaacgctatttagtcctatctagtgcggttgcattatggctaaatgcacctctcgtcgttttggcggataatgcagccgttacgacagatgtagttcatgtacaaggcacatgggcagaggaagaagcaaaattaaatccacagcaagtgcaaatcattaccaaaaaagagattgagaagaagcaggcgaagtccgtcgaagatattatatttacccaaacgggtgtatctagaaccgttgatgccatgggacgtgtaggtgtatctattcgcggtgcagaggctcgtcatacattgattcttgtggatggtcaaccagtattgggggattttgataagtattctggcgcagcggacgaagtacaacggttaggtgccgaaaatgtagaacgcattgaggttattcaaggtgcagcgagtgctaaatatggttctgatgcggtgggtggtgtcgttaacatcatcactaagaaggctcttaagaaaccaacattgcaagtaaatgccgaagggatgcgtcgtaagagtgatggcgatttattcccattccaaaacttttacattcgagctgattcggggcagatggggaaattaaaggttggcttatcaggtagtaaacgggatttaatgcctgtccttgcatcggttaaacgccgtgcatcaggtatgggctttgattatgcaaaacataattttaagcctaatgtgcttcgctattatggtgatgcctctgatattggctttgtggcaacgtatgaggctaataaaaataataaatttgaaatgcgtttaaaccgatatacagaagatcttgtacgggatattaaacattctgattccgatttagaaccacaacaacattttaaacgtactgctaatcgtaatacgattaatctttcgtggaatgctaaagcaggaaaaagcgattggacagtagaaactaactattctcgcattaaagaagatgacgtagcacttatcaattatacgggacgatcatcttatgaaggttctaatgagttacgatatatcgataatatcgaccatcgtcaactagatgttcggctcaatgcaaatacgcagcttaataataagcatcgtcttagttatggtgttagctatgctcgtgaagaaggttctggtagccgattaaagagttccccaaatacgagtaccatgtacatcgacccttgggcgtatgataagagcttgcttgtcgataagttagatcgtcttgtgcgtaaaaaaggggataacagtgttaaggtttattcccatattcatgattataaatttataaactccagtagcggtatgccacaatgggatatggattatgaatattatggtgctgaaacggatgcgcaaaaaccaggcattacatacgatgattatgtaaattatggattgtctgaaggtgctattagctcttggtctagtacatcccctaataatcaaccgatatccgatgactttagaaaccgttataatgcattaaaatcacggttagaagctgaaaatccagacatggctaacactcgttctaatatcgtaggcgactactttaaatatggcgagtccagtgatccggaaatgcgtaaaaaagcgccaaaactgaatggtaaggcattcttagaagagtatcgtaatcgcgaccaacgattgacgactggtcaaggtacgattcgcaagatgaatgcttatatctcagatacttggcaagtgaataagaaccttacctttgttcctatcattcgactagataatagcagtttgtttggttccaatttatccgcttctatggggatgacatacaatgtgaaaggcaatcctcatcgtcgatttaaggccaatgttggcactggttatacagaacctggtatgggcgaattgtggtataactgggaaatgtatgcgtctaatccggtaggtattggcgtcgcaaaactcggttggtactgggctggtaatccaaacttaaaacctgaaaaatcgctcaatattgatatgagtttagaaggtgaaaataaaaacacctatgctcgtgttggtgtattccataaccgcatcaagaactatatgtcggtttactttacaggagaattccaagattttgcaccatatttgaaaggggatgcaaaataccaacgtgccccagatatgatttacagctttaaaaacatcggtatggctgaaatcacaggccttcaagcggaagtacaacaaaaatttggtaaatattggtccggtaaattaggatatacctatttgcatgctattaataagagcgatccaacgatgcctcgacaattattggataaaccagtgcacaaggtagatattggtgtaacctatgacaatccaaaaactggttggaatggctccatttggggtgattactacatcaatatgctggatagtaacacattgaacaatggtggtaactactggccagatattttatccggtgatgcaggtgtgtacaaaaagcaagtttaccaaaagaaaacatttggcatttggaatttgatggtccaaaaacgatttaacaagaatgccatgatgtactttggtattaataatatctttaatcatcgagatgatgatcgagcaacacaagaacgggtatatcgtatcggtgttaatcttaagtttggtggtggcgatactaagactacgccaatcggaaaagatggtaataaagctattgatgcaaatggtagcgtaactaatgtagcggtcggtaatgaagcaggcgtacaaaatatatccgaagttgttaaactaactgactttattcgtcctgattttgatacgactaaggaacgtggcgtcacatttatcggagattatcgtgcacgttggatgtctcacgacggcaccaatcgtccacaatctccattccgctctaattcagccatcggttctgctaaagcgaatatgtacgattctaatcgccatagttttgaacaacgcattcgccttggtcttgatgctcgcatcaacccgttcacaaatctctccgttatcggtagcatgaccggtatgagcggcgttgatacaagttggactaaatcggagtcaaaaggtttcaatcatcaacgtcttgatacggttgatcttacaagacatgtcaagaaatgggatgtttctgtgggtcgtttaaacgaacctatgggagctagtggatactggtttggtcaatcctatgatggggttcgcggcgtatggactggtaatgatacccaagttcgcgttggtgtaggtagctttaaacatagcacgggtattagtgattctgcgtatactcatgtggtacatgaagtgatcactagaccgccaacagcagcagagttgattggtattaaccgtgatgaatatccttacgatatcaataatgctacaaaaactgggtctgatggtgaaagcaaatccactgaggatgcaccagcaccagatagcccaacaggtatttatgaatctacttataaaggtaaggtagatacaatttacttctatcaacagctaaaaggattacaagatgaatatgatgcgtataaagctacgttgaatctaagttggagcaatccgaatcgcgatcaagagattgaaaaggcaaatgctaagctcgcagaaacacaacaaaaacaagctcaagtgatgagccgcttacaagatattcttacaaaggcgtaccctacagatatggctgagaagaaattctccctcgatattccatctggtggttatacaatgtatgaaatcactaataagaatacaggggaaaaactctataagaccggggacattatgtataatgtgaactcttctttataccctgaatacttaaaagaaaaggctaaaggtcttatcgtatctactgataataaagaggctttagtaaatcctaaagcctatgttgaaaaacatagtgacgaaatcaatcaatccgtagcagaaattgctaaatataatgctacagataactggagcaactataacaatagtgagcttgatgtggtttgggttaaacagccagatggcacgttcaaacaatcttatgattactatggacaaccagctagtgattatgagttcactggttacttaggtgctaaaacatataaatacgatagtggtagttatgtatttagtgattatgatgctaaagatgcgatttacaaaaagaactttacaatgtcctccaatgattatggtgaaggtagttctgactatggttggggcatgccaaatgcattgttcaactatatgtataatcttgaaaaggttgtacatgatgcagagtctgaaaacaaattaccacgtgaagcaattggtaaaatcattggtaacatcattcaaaccgaaggcattgttcttgaaaaagatacaattccacctattgaaacggcagcctttgttcaagtgaagaaacaaattggcgaccgtcttggtttacaagcatggtacttacgatcctttaatggtagtaaacgtacattcttaaatgctaatggtaatggcaatgatgaacaaagcttctccaatatagctaatgtatttggcattggcgctaaatatcaaatcggtgaaagtgcagtacttactgtagactatggtcaaaatagatcgaaatttggtcgctacatgaacggtaatactgtatatgaccatgaacgtggaaccgcagactttactgtgaaaggtcaccaaatgggtggtacacctcatttctggatggctcgcctagacattggtcgtgcggatatcgatgttccaaaatcttggaacgcgttcatcgattataaatacttcgctcatggctcattcctcggtggtaatggtacaggtgctgtaccggatcgttacctcgatggtatccgcagctttacattcggtgctggctatgtaccgcgcaaggatttactccttgaagcattctatacatttgatgcgaagggcacaaataaacgagatactttatatggtaatgaaagctttaagttaggcgattatgcaagaattcaaggaacgtacaggttctaatgtgcagtctataaatagacagaaaggtttattagtatggaaaatctaaattatgtcattcacttgtttcatagtggcgggtatgtaatgtatccattattattcttgtctcttatggtcattgctatcgccgtagaacgcactttctactatcgtaaatatgcagggaaaacctatatagtaactcatgcggttaatgagtatgcaaaattacaaaaatgggatgaaattgaaaaggtaatcaaagaaaacccatccatcgctagccgtattgctgaagctggtttgaaaaatggtgctactgaagaaggcatgaaaacggcattctctgatcaaatgggcgtcgatgcagtaggttttagaaaatatatggattacttaagtgcaaccgttacaatttccccattgttaggtttacttggtactgtaacaggtatgattggttcctttagtatcctcgatgctggtgctggtgcatctgccattactggtggtgtaggggaagcccttatcgcaacggcaactggcttatgtgtagccattatggcctttatcgtgtatacattctttagccatcgtttggactctattattaaccaaattgaaaacatgtgtgttaacatcattaccgcaaaacgagaagggtggaaataactatgaatttacaaagttttcgtatgaaatccaagcctgaattcatgattatccctatgattgatatcatattcttcttattggtgttcttcatgatgaatagcttacaaacaattgcccaaaaggccttgtctgtacagttgccacaggctacaactgcatccgcaccagctcaattaccagtggtgcttacattagatgcagaaggtcacataacaattgataatgtcccaatgagcattgatgcagcagaagcaatggtaaaagaacgaattgcacaaaatccgaatgctagcgttatattgcaagcggataaacgctctgctcatggacaagtagtagcaattatggacatgcttaaacaagctggtgttaaacgcttagctattgcagcagaacagaaaggataactatgggattaggcatatcatggaaaaaagcagccataatatccgccgtagttcatcttatcattctctttattgccgttatctttttcgtagttgttccggccattcaagagcaggaaacctatgaagtcgatctcacccaaagtgtgctcgacgatggcggtagtggtcacgctggtggtggcggcggtgataggtcatctctattcccaaaaccattgtctgcagatgaagtggcggcaagaacaaaggctgtagtagcgaatgtagaaccatctacagcgacggacattcctgatgcggtagatgtcccaagtaagggtagtgaaaatacatcaaatgtatctggtgaaagcggtggtgccggtaatggtccaggctctggtggtggtgaaggtggcggccatggtactggtacaggaacgggcgttggtgatggacagggcgaaggcgaaggctctggtacgggcaagggctctggtggtggtcatggtcgagctcatgtcgattttgataaacaaggcttttataatgctgtaaataatcagaaggtgattcctcaacaatacattcgtcaacataaagaagttcatgaaacaatttacgtatttgtacgtattgatacaaatggtaatgccgttgaacaatatgtggaatctggcgatgatccattgttgagagaagaggctatggctgcggtaaatcgtgcattaccatatgaaaacccaacagatgacattcaaccggtaactgttccggtacgatttgacctatccgaaggtacagatgacgatgattaatcatacataatgtaaggagataaatatgggtactattattttatattcttccctcactgggaatacaaaaagcgtagcggaggcgatggcctctgttatgcctgaaggtacaccttgtgtaccggtaaaagaggcaccggccaatctaggggattacgatactgtatttgtaggtttctgggtggatcgtggcacagctaataaagaagcggctaagttgattgaaacccttaccaataaacatatagtattctttgctacactgggcatgtatgccgattctgatcatgctcgtgaaagtattgataaggcatctgccttattgcctaataaagaagctctcgtagatggttttgtatgccaaggtaaaatcgatcctaaggttatcgagatgatgtacaaaatgttcccgccaggatctgctcatggccaaagccctgaacgtgatgcattgcataaggcggcagaaacgcatccagatgaacaagattttgcaaatgccaaagaatttgctaaatctgtgcttgcaaagttgcaaggctaacgagtgaaaggggaaacgtatgagtttagcaagtttttttgaatcgattccagaaaaacaacggaatctacaactaggcttggcctgtgataatcctatgagtggcgcctttcctcataagcgcgttgttcacgcaggccttaatgggactttaatttcaccgaaggaatcacaatctgtatgggatactgtaatgcgtggtactcctaagaaggggcaaatgcagtgtgcttatatacatattccattctgtaagacaaaatgtacgtactgtggattcttccaaaatggtacaagtcaaagtattgaagataactatattgatggcctcattggggaacttaaactggctagtgaaagtccgcgcttaaaggatggtcttatccacgctgtattcattggcggcggcacaccgacatccttatctccagcaaactctgagcgcttgttaaaagcgattaaggaatacttaccactagcaaatgattatgagcttaccctagaaggtcgcattcatgatttgattcctgaaaatcttgaagtatggatgaataatggcgttaaccgtatgtctattggcatccaatcctttaatactgaagtgcgccaaatggtaggtcgtttggatacaaaagaaacggtactagaacgattagcggctttaaaagcctatggtcaatgttccgttgtgattgacttgatttatggcttaccaggtcaaactatggaggtctgggaacaagacttagccgatttagtaagctctggtgtagatggcgccgacttatatcaattaaatgtattcgatggtagtgacctaaaccgcgatattgcaagtggtaaggtaccacctgcagctacaacatctatgcaaggggatatgtttgaatttggacgtacctatttagaggctcgtgcctatcgaagattgagtgccgcacactggagtgctaataatcgtgaacgtagtttatacaatatcttagctaaagcaggtgtaccgatgttcccgtttggcagtggtgccggtggcaatgtggatggttatgggatgatgttacatcgtgcgcttaaaccatatgaagatatggtaagccgtggcgaaaaaccatttatggcacttatgaagcaaagtgatttacaaccatttgtaaaccaagtagtaagccaattggaacaaggttacttggatatcaatacattagtggctatggattctcgtttagatgaattgaattggttgtataaactatgggagaaacgaggcctagtttcgtataatggcttattgtataaattgacatcagctggtgaattctggactgtaaatattacgcaaagtacattggaggctatggaatatattataacgggcaaaaactcctttgccttagaatccgtagcggcccaagatacgaagactacatctaaagaaaatcctaatcaagagatacgtggtattggccaaggtaaggctaatatttcggtaccaaccgatgaacagacagaagcgcaacgcaaagaagcactcatgacaaaagcgaaagaagaaatcgctaagagtggtgcctctggtgaatcagcaaatcgcatgattcaagctatggcgaatttgagcgctgatgaaattgaatacatgatggaacgtatgatgtcctaattatcactaacaacctctcatataaataactacacacattgacaggtacgttttatcttagtattaaaaccctagattacgatctattctttaaactggactattcagtttaacgagaatatatcgtggcctagggtttactttttatgttttggaatgtattctgtacatatagttatacaaggtattaggaggttagtatgagtgcatttcctaacgaagtgatagatatagttggtattggggctagtaccttagatcgattcatcgtggttgatcattttccaacggggcgtgaggtgcaacaggccatctcgtctactacagatggcggcgggccagtagcgactgcactagccacggctggtaaatatggatctcggacggtaatgattgaccgtattggggatgatatggttggacgctatattctagaggactttcataaatataatgtcaatacagagggcatccaagttgatgtggatgctaagagtggaactgcaacgattcttgtgaaacagaagacaggggaacgggctgtattttttgaacgatctactgcaactgagcctgagttcttagaggctcataaacaactcatagaatctgcctatattttgcatatcaatggtagacatcgcaaactcatgcactctgctatggccgttgcaaaagaggtaggcactattatttctttagatggtggtgctcaacgctacgatgaagatatgaagcctattacagaagccagtcacatcgttatcgtagctcgagactatgctgaaaaatatacaggcacaactaatttagaagatgcttgtcgtatcattcatgaacgaggagccttcatagcaggtgttaccgatggtgctaacggtagttattttgtatgtcctgatggaacatcttatcgatgtgaaccattttctcaagctactgtagtagatacaacgggggctggggatagcttccatggtgcttttttgtatatgcttacaaaaacactttgcaaaatagcagatggtactaacacatcaactatgaatgaaacgagccagtccttaaatgctatcgatttactccatagttgtgcgcacgaggacttagaaaaagcggctacttttgcttctgctgtagcagctcttaatacgcaaggaattggcggccgcagtccattgccgagtttagaagatatcaaggcgcttataggataggattatggttatgtggaaaaatacttcaaaaaatcaagttcagcaatatatgcaacataatccttatcgtctattagctcttagctttttggctgttatgactatagggacgatattgctcatgttgcccctatcaaatgctcaaggccatagtacagcgcttgtagatgcagcttttaccgcagtatcttgcgtttctgtaacaggattggcgacagtagatacctattatcattggtccttgtttggcaaaatcgtcatggtaatccttatccaattaggtggtttggggattgtttcctttaccactattatcgctctagtattagggcgacgggtaggtctaaaaaatcgcgtgcttttatctgaggatgtagggcaagatggaatgaaagggcttttacacattacgaaaaagctaactatttataccttttgtgccgaaattattggtggtattctctataccattcagctatatccttatattggtgatgctgcattatatacgggaatcatgcaatccatctcgaccttttgtaatgcagggtttatattctttgataataatctaccttatgccatggtgggcgatgtattatttaatataaatacaatggcccttattgtaataggtggtttcggatatctcgcaacctttgatatttggtcgcatcgcaagctacgacgttttgtagatttaaaactacacacaaaaataatgttagttggcacaacggtgctcatccttttagggactattattttcttgggagttgagtgggcgaatcccaaaacttttggtcctttacctatatggaataaggtcatggctgctctatttcaatcgattacccctcgtacggcaggtcttgcaactgtagattataatgatttacatcccataactctgtttattaccatcatttttatgtttatcggggcaggtcctaactccacaggaggaggtgttaaaattagtactattgctgtcgcttttctagcatcgcgtacattatttaataaccgttctgatacagaggtttttgaacgtcgtatttcgttggttactgtccttaaggcaaatgggataatctttttatccatccttcttgttttgcttgctacttgctatttagcttgggatgagccgtataactttattcgaatactttttgaggtaacctctgcctttgggaccgtaggtctttcgacggggattacacctgatttatctgaaagtagtaaatgggtgttgatgcttgtcatgtttacgggccgtgttggggttatgactgttattggtacttgggcgttaagaacggcaccgactaaaccaattagctatgcagaagagcgtgtattgttataaaaacagattagattgaatataaaagggggcatatatgaaacataaaacgatagcagtaataggtcttggtcaatttggtggcactgttgccaagatgttagcttccatggatcatgaggtattaggtgtagatattgatccagaagttgtacagaaaatttcaccatttataacacatgctatagttgcagatacaaccgatgaagaggcaatcaaagcattggcgctaagccagtttgatatggttattgtggctataggtggaaatcttcaagctaatctaatgacagctatgcttcttaaagagttagacgcacctaaaattgtggccaaggctgaaaataatatacaaggtaaaatgcttcataaaataggtgtagatcaagtgatttaccctgaatatgatatggcattacgtcttgtacaatttttaactagagaccatgtgatggattatttacaactatccaaaaatattagtcttatagaaataaaaatgccttcatttatggttggcacatgtttgaaagattccaatttgcgtgaaaaatataatcttaatgcagtaggcataagacgcggtgaggatttagaagttccaccaaacccaattaccatcctcggtgaagatgataaattattagttattgggaataattctgatttagattcattaacagtgtagtaagtatacgaaacagatataattatatcgaaaaattatgatacaataggaatagaattcagtataggccgtacgtattcgtatggcctttttagatagaaaagaaggttattatgacagaggaacaatatataacggctctcaaaaacaatccccatggcatacgtaatatctctaatcctacagaggaaatgcagttagtctgtgtggaacagaatgggatgctattacagtacattaaaaatcctactgatcgagtgattgaaactgcgttagcacagtcgccgcgggccattcaatatgtggacaatccaagtgacgaattattgatttcattagtcaaacaagattgggcggtacttgagtatattcaacatccatcagatgaagtggttcgcattgccttagatcaatcgggctgggccattcgatatattacaaatccatcagaggaattacagttaagggctgtagaaacacaatatgatgcattgcaatatattgctaatccatcagagcgggttcaaatggctgctgtaaaatctaattatttatcattgcgctatatccagaatccgacattggacattttgaaagccgccgtgttacaagatccgcaggctatgcgtcaaattacgaacctagatttagatacagtggtagagctattgaaggtttctacattgatacttgggtatgtaccgaaacaaataggcttgactgtcgatatggttcgacaaattataactgaaatgattgcaaatccagctgtagaagatcgctatgtacgagaaatcgtaagcaatcctgccattggtggacgccaatcaacatggcccatcgatgtattgtcattagttgatgcatacggatctatagaggcaaagaaaattgctattgatcagtatttactatattaattaagaaggagtcataatgaattttacagatacaatggctagtgtggaattggtactagccgctaatcaagtaccattgctcgttggtgaaacggggattggtaaaacatcgctagcaacgcgcgtagcagagtctcatgattgggaactcgtcaccattgatggtaatcttttaaaagaaggcgaaataggcggtttgcctacggtggaaactgtatctcataaagatagtaatggggcggttaaagaaataaagaccaccgtgtatgccgtacatcatacattagaacatgtatcaagggctgttaatgcaggtcgacatgtgttgctgtttatcgatgaaattaatcgtgcagagcatgcggtgcaacaagaattgatgaacttaattttgaaccgagaaatcaatggatttgttttgagtgatgatgtacgcatcattgcggctatgaacccagaggattcctttgactaccaaacgattgatatggatccagcccaacaaaaccgttttgtatggctttatatggaagcggattatatgcagtggattgactgggctatttctgcaggcattgaagataaggtggtggaatttatctcctcttatccagattatttaaatcaacgtcatgaagatgacatcgatgctacaccgcgttcctttgaacggatatctcatatttatggtatctataaggaaggtggttatagccgtgaagtattccaaaatgttatccgtggtaatgtgggtaaactcattgcggaggcctttgttaatttcgttgaaactgaacaagagccattgatttcctttgatgatgtgttagaggctgtgcataaaccgggtgccattatgtccttgcaagaacgtgttaatggtgaaagtcctactcgcctctatgtttctgcgaaaaatatgttgtatcgtttgaatcgtaatagtaatgccgaagaagttcattactttattgagttcatcacattgtatccaggtgatttgcgcattgctgttatgaaagatttacgcaacgcatatgctcatgtgtatagctatgctattgaggatgagctctttattgaaacgttttttgaagccaatcgttaattgtgaaagtgcatatgacaggtagaaattatgaatcgaaatttagataaagacgatattcgggatgcgtctgacctgcttactcatatagacggatgggagaagactggacgctacgatgaagaggctatcaaggaactcgatcgctggcatagaaagcgtaatcagattgctcgtgatgcggatgcgttgtatgagcaagtatatgcgcgttatcaagcgtatgtagatgaacatccagtgcataaacaacaggcagaagatattgctgtagatatggtaaatcacaatatgtcggatagtcatattggcacgataggcaagggattaacggaactgtatgagggcgaaggcacagatctcgatgtgttgacacaacacgtactagccgatggctatgaacaacggttatggcatatcttgcatgatgtaaatagtttattgcttgacgaggatcaattctttggctatttttatctacaaatgacgcatcgtgtacgcttagatatgaccagcgcttttggtgttaacctcaaacacggtggctatgtgctatacgtgaatccttttattatgttacgacaaccgccggatgttatgaaagacggcattaaacgagaaatattacatgtcatatcagctcatttgatgcgggtgaaagaacttagtcaacggtttaataaaaaagctgttcacatggctatggacatggttgtaaacgattatttagaacatgtagaccgcgatgctataaccgttgccaatgtaaatgcgagatatggacttttactaaagcgattccgcacattggagtactacgcaaaggccattgataaggcgatgcaggaaaaaccagatctttttatagctgtcgaggattccagtcaaatcatagccatggagtttaatgctgattcaagccatgacatttgggatgagtccgatgctatcgatacagagacgatggataaaattacggaacgctatatcaacgaagcatcaaaaggggatatggaaggttatgtaaaaagccttatcgatacattccaaaagacgcgccgttccttgccatggtatttttatcttaaaaagttgatgggcaaggtggctagcggacataaaaaaacgacgatgcgtcgcaatcgtcgtcagcctgagcgtctggaattatctggcacattacgtcaacataaggcgaatgtgtgggtagccctcgatatgagcggtagcattacagatgcggaatttaccaatgctttagaacaagtattacaaatcgtacatgcctataatcatcgcattaccattgtagaatgtgataacgaagtacgtcgtacctatacaatggaaactgtgaaagacgtaaaaccacgactcgatgtgcgtggatcaacagccttttcacctgtattttctctagctaatcaacatcacgtagatttactcgtatactttacggatgggaaaggcgaagaccgccttcgcgaagtgccaaaaggctacaaagtactttgggtccttacgggctctgaacctaaattatccttgcataatccgcacggcatagttcgtgaaatgggctatgtagccgttgacgaaacacaagatattgacgaattcgtgagaatgagcagtcggtcggggttttccatggcgaatcaagagtaatcattgcttaacaatctttattttatattacggtagggtgggttcgatggcttccaaaatcttccaccggctttttcttcgccccttcggggctcaggccaaagtcagattttgaaagccatcgagcccttctgaacgtcttattaatttagtccattaagattgttaagcagctgattactacttcgggcataataaagaacgggccaaagtcagattttagtcaccctcgtcccctttctgaacgtagatgctaccaagcttattaagattggtaagtcattgattacatcgggtaaaaagagaacgggccaaagtcggctgatagaggctattgattcctttctctcgtgttatatggggagaagaaaaaggacgcgattgtgtcctttttatggattggggccaaagtcagattttaggcatcctcgtcccctttctgaacgtagatgctaccgagcttattaagattgttaagtcactgattacactgggactctggaattagaacaggcctgttctaattttaaaatgcatatatcaagggcggaaaagactagattttagacgtccctatatcttttttgagtgtaaatactatttaatttattgagattatgaaagtattattctaatataaaaggacgcaattgcgtcctttttgcactctattgatttatctgtattagttttataatagataaattaccaaggtgaaatgacaaaaatggccccaaaactctgactttggcctgagcccgtagggcgaagaacaagccggtggaggagtttgggggctgtttttgtcacaacattgtaattagttatttaaaacaatagaagaacctggatcaataataaccgcagtttggttgtatttgccttctactaggcttgtgaatacagctggttcgcggtcgataacaggccatgttttgtaatggattgggatggaaatgcgagcttttacatagctagctgcaagggctgcatcttcaacgcccattgtgtagttatcgccgatagggagaagtgcgtagtcgatatcgccaaagcggtttaatagtttcatgtcgctaaagagggcagtatcgcctgcaaagtatacgatgtcgccgaagaagttgacgatgcaacctgctgcgtgaccacctggtacgccagcgccatggaatgcaggaacgatacgaacggaaccaaattcaaagtcatatttaccgccaaggtgcatcgcgtgtgtacggcaacctgcagcagctgctttgccagcaacttcagctgtagagattacgagcgcatcgttagctttagcgatgaactctgtgtcgccgtagtgatcatcgtgaccgtggctgacgaagatgtattggcatttaatatcttctttttttgcgatgtcccatgtattgcctgttaaaaatgggtcgaaaatcatggatacgtcaccgtttgttaacataaagcacgcatggcctaaataagttaattttgttttcataggaacacttccttcctcatatatactaatttaattatattgtataatagaaatggaaaaagtaaaactattgatgtacatttatacataaaataaggaaatattatggaattaacacattttgatgaacaaggtaatgcgtggatggtggatgtttcggagaaggaccatacgcatcgtattgcggtagcagaaggttttatcgctatcaatgatgccatttttgagcgcattcaaggtgggacgatgaagaagggggatgttttgtctgtcgctcaattggctgccattatgggggctaaacaaacgagtaatctcattccgttgtgccatcctttgatgcttacgaaggtagaggttcattgtcaccttgttgatgatgaaagtttagctttcacaacggatacacataataaagcggttaaaattacggctacggttaagacaacggggcaaaccggtgtggaaatggaggcccttacggctgttcaagtgggccttcttacggtatacgatatgtgcaaggccattgataaaggcatgattatggggcctacgtatctcgttgaaaaagatgggggcaagagcggccattttattcgaagtagcagtaaataatcttagtggtgtagtgctagttgtgtcccacctaggaaaaatagaattcactacttgaatacgcactttagattaggtagaataatatagatataagaatagagggaataatatggaaattgtattatatgaaccggagattcctggtaataccggtaatattgcacgcctttgtgcggcaaaccatatgaccttgcatctcatcaaaccattgggcttttccattgatgacaagcacgttaaacgggcgggccttgattattggcatttggtagatgtacaggtacatgaaaatatagaagaactatatgcgaaatatcctgatcgtcgttatttttatgctactacaaaggcaaaacatgtgcattctgatgtgaaatttgaaatcggtgatatgctcgtatttggtcctgaaactagaggtttacctgaaagtttattagaaggtaatgaagaaacgtgcattcgcattcctatggtggaagaggcgcggtctttaaacctttctaattctgtggctattattgcctatgaggctatgcgtcaattggattatccagatttgaaagaagttggcaattggattagccataagtaaaataatgtatgatgtttgtgagacttagctttcacaaagaatagtgtatgcaatagggggaatgaatatgaattacgataaagctcatgatttagcacacgcaatgcgtgaatctgaagagtataaagagttgatgcaagcgcaagaggctgtgaaagctgacgcagaagcaactgcattggtgcgcacatttatggctcaacaaatgcaatgggaatatgctaagttgtccggcgcgcctgaagcagatgatttgcaaaagaaacaagaggaattgatgcctcaaattcaagcaaatacggcagctgctaattatttgcaagcgcaaatgcgttggagccaagtatctaatgatatttacaaaatcattagcgaaccaatcactgaggggatgaaagtgttagatcatggggaaaaacaacaaccacaacattaaggccctacaaacggctttattaaaagaattaccaagtacacgtgtacgagaagaggaatatttacgtcatcatacgacatttaaaattggtggccctgcggacctattcgttgaaccgactacgatggctgaattgagctttgcgcttcgcaccattcacgagtttgatgtgcctgttaccattatcggttgcggatccaatattctcgtgaaggatggtggcattcgcggtgctgttgtatctgttcgacatatgacacaaattatggactgtaatgataacgtattgtgtatcggttctgggtatatgttgaaagatgcctctgagttcgcctgggaaaatagcttgaccggcctagagtttgccatcggtattccaggtacattagggggtgccgtgtttatgaatgccggcgcttatgatggggaaatgagccatgtagtcactgcggtgcgagctgtagattttcaaggcaatatcaaagaatacgatgcatcgcatttagattttgggtatcgtcatagtgtattccacgataatcatgaggttattggcgaagtgattatgacgcttaaaccaggtgataaaaatgttatcaaggctagaatggatgagcttacagagaaacgcgagtccaaacagcctttagaatttgctagtgctggatccacctttaaacgcccaccagggtattttgcaggaaccttgattgaacaaacaggccttaagggcttatccgtaggagatgcgcaagtatcccataagcatgcgggctttgttatcaatacaggcagtgctagtgcgaaggatgtactcgatttaattgctgaagtacaacgtcgcgtatatgaccaacatggtgtacatcttgaaccagaagtacgtatgattggcgaagattaatacaaactaaatactcatacaagatttcttatgtactgttactctttttaaggagactgtattcataagaaatctttttttatggtttttaaaagagtatgatggttatatagttcatttgtgtttaggaggcgatgatatgaatactttgttggcccaggagattcatgataaagcgctagcatgtgggtatgatagttgtggtatagtgcctcttgatgcacttgatttttataaagaccggttaacgaagcgtttagaagatgtacctgaaagtgaagatgtatatgctcatagtaaagcttttttgacattgaaagaaaattatccttgggcacaatctatagtagtttgtactgaatattttggaaattataagtttcctgtgtcgctgcagaagcgatatgcaaaagggttattattgtcgttagctaatacccctgatggtgttgaggctaaacgaagacgatcttttgaaaggtggttacgtagtaagaatatccaatttattggcggtgaaacagccaagcccgctggcgttgttcctctgcgtcctgcttccgtagcagcagggcttggaatttttagaaaaaataatttcttttatggtcctaaaggttctaattatgaattggtagcctatttaatagataagtcttgtgaatatattcatgatacggatattcctccgtgcccagattcttgtaacctatgtcagcaaggttgtaaaacgaaatctttatctgcaccatttacgatgaatccaatgacatgtgtttcttttattaatacctttggtgatgggaatatgccagaaggtgtgacagaggatatgttggaagagtggattataggttgtgataattgccaagactcgtgcccatttaataagaatcatgattggagcgtcgggaaagactatcctggacttgatgaattggaacctatactacagccagaatttattttgaaagcctctgatgaagagattatagaacagatgattcctaaattctgttttcatttaaggaatgaacaaattccattgttgcgtcaatctgctaggcgcgcgatagaatacaaaaaaattaggtagtaaaaacaatgagcggcctataagatgagtcaaaagtataatcaaatgttgaaattgccatgattagaataggcgtctgttttgacttttttctatagactgcgttataattaagtgttgccaattttgggaatatacctatgtagcgactttcacaagcgttatatgatatagaatatactaaaagaattaaagggaggatcttatgattcgcgaaaatcttcgtaatgtagcgattatcgcccacgttgaccatggtaaaactactttggtggacgcattattaaaacaaagccatgtgttccgtgaaaatgaaaaggtagcagaacgcgtaatggactccaacgacttggaacgtgaacgtggtattactatcttgtctaaaaacactgcagttatgcatgatggcatcaaaatcaacatcgttgatactccaggccatgctgacttcggcggtgaagtagaacgtgtacttaacatggttgacggcgtattgcttctcgtagacgcttacgaaggtccaatgcctcaaactaaatatgttttgcgtaaagcattagaacaaaaattgaaaccaatcgttgttatcaacaaaattgaccgtcctgaccaacgtgttaaagaggttgaagatgaagttcttgaattgttcatggaacttgaagctgatgatgaccaactagatttccctgtagtatacgcatctgctcgtgctggtgtggctaaaactaactgggatgacgaagctgtaaatatggaaccattgtttgaaacattgattaaagaaattcctgcaccacaaggtgatttggaaggtcctcttcaattcatggttactacacttgattacgataacttcatcggtaaaatcgcagtaggccgtatcgttcgcggtaaaatgaaaactaaccaacaagtagctatcatgactggtgaaagcactcgtaaagcgaaaatcggtcgtgtatatacatacaatggcttgaaccgtgttgaaactgacgaagcacaaatgggtgatatcattgcgttcgctggtatcgacgatatcaatatcggcgaaactgtagcagatgctgaaaatcctgaagcattaccatccatctccatcgacgaaccaacattgtccatggtattctccgtaaacaactctccattcgcaggtcgcgaaggtgaattcgttacatcccgtcacttgcgtgatcgtttgttccgcgaagtagaaactaacgtttctatgaaggtagaagaaacagattctgcagatgctttcaaagtatctggccgtggcgaattgcatttggcggtattgatcgaaactatgcgtcgtgaaggatatgaattacaagtaggtaaacctcgcgtaattttcaaaactattaacgacaaattgtgcgaaccattagaagcattgactatcgatgtacctcaagaattcatgggtactgtaatggaaaatcttggtcaacgtaaagctgaattgactaacatggttgagttagctggttaccttcgcatggaattcgtaattcctgctcgtggtttgatcggtttccgtgcacaattcttaacagctacaaaaggtaatggtattatgaatcatgtattccatggttatgcaccatacaaaggcgaaattccttcccgtacacgcggtgccttggtagcatttgaaaatggcgaaactacaccatatggcttgaactctgttcaagatcgcggtacattgttcgttggtcctaaccaagacgtgtacgcaggtcaagttatcggtgaaaatactcgtgaacttgatatggatgttaacccatgtaagaaaaaacacgttactaacatgcgttctagctcctctgatgaagcagttcgcttgactccacctcgcatcttctccttggaacaagctcttgagtggatcaacgatgacgaacttgttgaagtaacacctgaaagcattcgtatgcgtaaaacaatccttgatcgtgctgcacgtgcgaaagctgcaaaaaataaaaaataatatctatacaagatatatgaaaacgacactcctggtgagtgtcgtttttgtatttttataagatttaagtattcctatttattatatgtatatgaaagttagatgataaatttatcatttatgatagataagcatagtaatgcttgtatatatagaatatgcataatagcttgattatacgggtataggtatatacgaaacctctataaatttgtataataataacaagtttgttgatataagttattgattatggaggtttttatgaataagaaattattagcatccttatttgctgtaggtttggctgcaggttgtgtatgctcttccgttgacgctcatggtgtattctttgctaaccgtaccgatgaaaaagcccttgttcttggtgaaggccctgtagataatgcctatagtgcagatatggtgaaaaatattactggctatgatgttcaaggtaaacaaattccagtacaagttgttaaacatgaaaaaaatgtagctattgttccaccagcagatcttggtgttacagtaactaattttgattatggctactggactaaaactaaagatggtaaaatgattcataaaccaattacagaagtaccaggtgctgttaagagtacacatgctatcaaatatgatgttcactattggaatgcacaagcaaaacctttcgtagataaagatgcatttatccaaatcattccatctgttaacccattaacacttagaaaaggcgatacttatgaaattcaagtattgaaagatggtaaaccttatgcaaatgcacctcttattaaagatttaataaatgatttgactggtgaagctaaagctgatgaaaacggtaaagctactgtagcggttactgctgatggtttaaatgtagtgggcgtagaagttgcattccctacacaaaataaaggggaacaaaataaatactttagtgcattgtcattccttatttctcctgaagaataataattagtattttctagtacttaccgagtgtgtgagttaataaaagacctcctaagttggccttagggggtctttctatgtttttgagtgtatataaaccagtctgttgagagtgtaaattaagactggctaagaaagaagagagaactttatgaaattacatcgtcatgtatcggcagtcatggctgcattagtgttaacaggtttatcttattctgctggggctactgatattaatgtatcgagtgataaagcagaagaattactcggtttatctatgggttctcctacacaaacacaaccagaggttaagcatattgaagatacattaacggttaatgtacatggaaaaagcttaaccgatgcaggtaaaagtaaaaatgtaacaggtatctataatggatttggatcccagttaacggtagataaggatttagtggttcgtcttaaaaatgatgcgcctgcttctaaacgcgaattgggtcattattatatgagtgctgtttatgctggttacggcggtaaggtaccacgtcttagcaaggataatccggaccgagattttggggataccaatattcacgttaaaggtaatgtagatattgatgctatcggctctggtttacaagtcaatcaacgaggtcatatccttgttgatggaggcggtaagattatcactcatcctgtagaaacatctgatacctattctgtagtagcagaagaaggggatgtatatgttaatgcaggcgctgatggcaaacatccaggtactaaggacctagttgctgttggcaatgtgggccttatcaataaggactatggacgcgatccaaatcataatgaaagccctactaatatagcgttagctttcacaacacctaattctagccttaccggtgctgttttgaatgaatatgctgaaagcaataaaaatccacataattccggtgcggatatttatctacaaaatggggctatttggaataatgaatggattggcatggaacgacctactcctaaaaaagaacgtccttctggggataatgaggcgtacctatataagggaagtaaagtacgtaatctcgtaggtggagcaaatccaactgcagcaggtatcattcatccaatcgatgcacgtccaatgatgattcaaaactatagtggttttgtgaatgctgattacaaagcaggtacaccagctagtgaagaaggtaaggggcaaatcattatccaacatgcggctgacaatagccatgtaacggtgcaaggggatagtgctaaaaacttaaccgatgatgctagctatcgtgctgaaatgcaatcattggccaacaaattacaatatactggaaatgataagaaactagctaccgcagttcaaattaatgaaggaattacacgacctgcagctgttgcagaacttggtacagatgcatttgatgcacaaggtaatcttgttgtaggtaatacggcgactgttaaacacactggagaatcttcgttggtaagtggtacaaaatccgctcttgcatctacggctatggcatggcgtaataatacaaacgatttacaacgtcgtttaggcgaccttcgtttagctaatacagatcaaggtgtgtgggctaaatatattggtggtaaatcaaagattacagatggcgctgatgctcgcatgacctataatggcgttcaacttggttacgaccataaggtatcgaatggctggatttttggtggtgccctagattacagtacatctagcaattcctacgccgttggcagtggtgatggtaaaattggtggtattgcactatatggcacaaaacaacatgatgatggtcgttacctagacattatcgctcgtggaaaccgtttatccaataattacaaactttattcggtaggtggacaacgtgtgaacggtgattaccacacatttggcacatccttgagtgctgaatacggtaagcgcattaagaaacaaaatggcttctacatcgaccctagcgtagaattcatcgtaggtcgtttgaatggcgtatcctatgatgctaatattgccggtggtggctccatgcatgtgaaagctgacggcgttaactccgccgtgggtagattaggctttggtattggtaaagaaacagaaaaatccaatatctttgcaaaacttgcattggctcatgaatttgctggtaagatgaacacaacctattccgcacctggcaatccaacagtaaaaacggaactcgatttgaaagatacttggatcgatgctgaaataggcggttcctggagcgttcgccctagtacatacctatatggcacatttacgaaaaactttggtgctactatagataatacatggcgtatcgatgcgggggtacgacataatttctaattgaatatataactattttgtaggtttattttaatagaagttttagacggccatgaatagttaactttatagtgcaaaaaacatcgactaattcatatgatagtagtcgatgtttttgtttataagataaaagattattattttataatatgacaattgattatttattaaaattactagggctatattttacggcgataatgtgtaattatattttctttaattctgaaaagagggttcgggcatctaaatctattaatttaacaaattcacatttctatgctaatatataaaaactagagcttatacaattttttaagtaaaaattaggagaatagaatatgaaagttttgatcgtaaatggtagtagccatgtaaatggtacgactatgcaagctatacaagaggtacaaaaggtattcagcgaagccaatgtagagacagaggtcattcagcttggcaataagcctattcgtgattgtattcaatgtggctattgttttgaacatggcgaatgtgtatttaaagatgatgatgtaaatgcattcgtagaaaaagcgaaggatgcggacggatttatttttgccacacctgtatattatgcacatccaagtggtcgtattttatcctttttagatcgtgtatttttcagtgcagaaaatgtaacaccaaatccatttgcctttaaaccaggtgcatctattgcggtagctcgtcgtggtggcacaacggcatcctttgatgtgcttaataaatattttggtatttctcaaatgccaattgcaggctctacgtattggaatatcagccacggcctagtagcagcggatgctaagcaagatgaagaaggtatgcaaaccatgcgtaacttggctcgtaatatgatttggatgatgcgtagctttgcggtagccaaggagcaaggtgtgccatatccagatacagagaaaaatgtatctacgaactttgtacgttaataattcggcacttggtgtggtgttaaaggagatataatggttaatgttttatttatctgtcacggaaatatttgtcgttctacgatggcagagttttatatgaagcatatcgttaacgaggcaggtttgactgattctatttatatcgaatctgctgccacatctcgtgaggagatagggaatgatacccattatgggactaaacaaaaattagatgaaatgggtattccttatactcgtcgtaaggctcgccaagtgactgtagatgattaccatagatttgattacctcgtcatcatggatgaaaataatgcacgaaacttgcgtcgcattatcggtgatgatgtggatcataaggtgcataaggctatgacctttgttggtgaaagccgagatgtaaaggatccttggtatacgggaaactttgatgaaacctatgatgatgtcagtcgtagctgtgatgcactcttacaggtcattcaaaagaatatgtaaaataatacgcctctattattatttcatcgattagctaatgataggggcgtatgttatatgtccatgtgctaatatactttatactatcgaagcatgctgtaatatggtataattctttagtacacatgcgcctatagctcaggggatagagcgccggtctccggaaccgggtgcgcaggttcgaatcctgctaggcgcaccaatagcaaacggcttctcgaaattttgagaagccgtttttgtatgttactatctatatttattacattgaattcctctagatctaaattctttcatgagtatgtctattgatttatcaataatttcttcgttagatatatataccatttttttgtaatagacagtaccatcaaattctatccaacgacttgtcttaccatttattttgcaaatcttcattctaccggcccaacttcccatgctgcggaattttttgcctttagagaaacgtacttcgcgaatatcttttaatttatatgttcttcttactaatccaatgcctatagagacttgatcatctttaaaatagagaagtttataacgttcttcaggcggcatagatttaatcatagataagttataagtagcaaatgtcacggcaatagcaactaatacaaacattaggattagtatataggttcccatactttcaagtcctccttttctttattataataaatataagtggtgtacgaaataatttttatcgttaacattgaagcgatatttgtatgtattaataggagaaaaatgaatggacatacatgaacgtactactaaatggagtaaaggtatatctgaaatgtattctatagtttacacttcatgaatgaaatttcatatcagttatatatttgatatggtataatgttaccaaattatttatgttgttcatgttattttggttttcattatagtattacagaaatggagagaggattatatgagttcattaatatttctgctgatattagcattggtaattttctttattaagcaatataatacattgcaaaaattaactgtagagattaaagaagctcgcgctaatattatcgtagcctatgagaaaaaggtagctattatcaatcaatactctggtttagttgatgaatatggcgattatgagaaatccattcaattaaaggtgtctgataatttcttggaaatggcacgtgcaacggctaaggctgttcaaaatattacggcgttagctaatcaattcccagagttaaaagcagatagtcaatatggtaaatttttagaagcgattagtgaaaatgaaactttcatttctaataaacgggaaatctataacttccaagttaaagagtacaatagtgctattgcgcaaattccaatggtattcgtagctgctatgttgggctttaaacaagcgccattctttgatcctaagaatgaagacgctcttgcagcattcagcggtgcagatcctgaggctatcaaaaacttagctaaagaaggtactgataaacttagagatacattcgataagaaacctgctgaatttaaacctcaagataaacctgaacaatctgaacaaccaactagtgtagaagaattagaacaacaagttttaaaacaaaatgagcttggtaaatctgtagatacagaagaaactaagcaagatgataaaaaatagtttatctaactataagggactataccttatgcaaatatattgcatgtgggtatagtcccttttgatgattattgggaaataatgaaatatattgttttctaatcattaaaatagtacaatgcgattagattagattagattagattagaaaggaggtttttatgtataagaaatcggaaataatagaattaaaaagagaatatacagcggatattcgtaaggagattattgcctttgctaatactaatggtggtactatttatgttggtattgatgataatggcgatattgtaggtatagatgattgtgatgctcttatgttgaaaataggtaatttagtgcgagattccattaagccagatattactgcatttattcattacgataatttggtagagcatgataaaaatatattaaaaattacagtccaacgtggcacgttaagaccttattatattcatagtaagggattaaaacctagtggtgtatatgtgcgacaaggtttcgcttctgtgccagctagtgatatgttaattaaggatatgattcgcgatactgacggagatagttacgaaaatgctagatccttacaacaaaaattaacatttaaacggttaaaacatgaatttgatggtaaaactctagcctttaatgatccgcaaaaaagaaccttaggcattactgaatttgatgatatttataccaatctggggttactattgtctgatcaatgtcctcatgagttgaaaattgcagtatttcagggaaccgatggatatatttttagagataggcgtgaaatcagaggggccttattagatcaattatatgaagcgtacgagtatatagataatcgaaatgcagttaaagccactattgaagggcttcatagaaaggataaacgagattatccacagattgctattcgtgaagcattattaaatatgctagttcatagagattattcgtatatggctagtccaaccatatgcatatatgataatcgtattgagtttacatcgcttggcggtttgccacctagaactagtttagacgatattttattagatgggttttcattgtgccggaatcccaaattagctaatgtattttatcggttagaattaattgaagcctatgggacaggcttacaaaaaattatggatgcctataaaaataaaacagttaaacctcaaattattgtgactactaatgcatttaaattaatattaccaaattgcaatatcgatgagcctatatctgaacataatgtacctaaaattagctatcagcaagaagaacagatcattaatctagttcgtgattgtggaagcatcaaacggagtgatgttgatacagaattaaaagtagcacaggccacgagcggtagagtattacgacgattagtggagaaggggcgacttaaacagattggcaagggacgttctatacgatatattttatccgatacaatgtaaatatatagaataggatattcgatactttagataatatatgtaaatgtgactatagtaacacaaattttattgagaataatatacaataaaaatatagtatccatatacaaaatctgaactgcccatttggaacgatagggccatatggatattgtgttaactatatttacagtctagaggatataatatgaataatacaatacaagaagtatctgttgatctccatgattggcgcgatgaacaagcggcctggaataatcgatctaaatttttcgtagaactacataatcgagcagatcgtaaggcacaggtaactgactttctctcatttttaaaggacgaacatctattacctccaaatggtgggactgccctcgacattggttgtggtgtcggcgattacgcacttggattagctagagaaggctataaaactacgggcattgatttatccgatggtatgattcagggtgcaaaacaactggcagatacagaaggccttgatgtgagcctatatattgcaccatggtctgaagaaactagacagaaattaggttggaataaaacgtttgatttggcatatagtattttttgtcctattatgtttgatgtagagaatatacgtgccatgcatgatgcaagccatgatacatgtctatggattgcatttagtgaacgtatggatgaaacggtagatatgttgtccgaacatttcttcggacgagattcatttccgtgggctggtaaactgaaagaatgtttagatgctattcatgagataggtcataatgtgaaagttacctacaaaacagttcctgaaacagaggttatgagcatcgataaagcggtagattattttacgttgcgcctccacaataatgagtgggggaccatagaagatatgaagcgagaaattagacaactcattgaaccccgtactatagatggtaaaattcataataaaacagtggatacggttgcatgggtatcgtggtcggttaagtaggaggtattatgacagtagaagagaagcgtcaattagaactcaaaacgatgcgtcaaatcattggcatctattgtcatgataaacatcatacgccgaagggccaactatgcgaagattgtgaacaggtatggcagtatgcacagtatcgcatcgatgtatgcccacatatggagcataagacgttctgtagcgtatgcaaaacacattgttatgcgccgacctaccgagaaaaaatccgtgaaatcatgcgctatggtggtccgcggatgctactacattctccaattcaggttattcgtcatatgtatttagaatggaaagacaaaaaaagtattaatactaaggcataataaaatgcacctcttacattaaattgtatgttagaggtgcatttttattagttatatagttttatgcaagcgctttgtcgaatacagccttgatgtatgccttagtttggtcatagctttcaccaggttgtgcttcgtattgtttatcagtaccgaaccaaaggttagggtagtattcatatggatgcgttttgaataattcgtgagcatcttgatcctcaacccagtcgattttgatatttttatatgcaggattttctgcttgcaattcttcgattgcacggaatgcgttatggcaataagggcaaccgtttaagtggaaacctaaaatttctttcatagtattcagtcctttcagaaaatacgactaaatttagtgatttattgagttatttcatactcacatcaactaagatgtgatatattaaaaagtatatcataaataataacaatattcaattttttagatataatctgctaacatttgtaggttgttatataggaggatggctatgatttcaggtgccgcatacgtggtgaaggcattgcaagaggagaatgttgagattttattcaactatcctggggcagcaaccatcgatattatggatgaattatacaaacaagatcaggtgaaagtaattttacctcgccatgagcaagcattagcacatgctgctgatggttatgcacgcagtacaggtaaggttggcgtttgcatggttacttctggcccaggtgcgacaaatcttgttaccggtattgctacagcctactcagatagtgtacctatggtgtgtattacaggccaagttgatttggcgttgatggggaatgatgcattccaagaagtagatacggtcggcattgttcgtaatgtaagtaaatatgctgttaccgttcgtgaccgcaaggatttgggacgtattttgaaagaagctttttacattgctcgtacaggccgcccaggtcctgttgtcgtagatatacctaagaatattcaaaaagcgatgggctctgatgtataccctgatgaagttaacatccgtggttataagccaaatacgacagttcacattggtcaggtaaaaaaagcgtgctccgttattgctaaagctaaacgccctttattcttattaggtggtggtattagcatcagtggtgctaatgaattgatgacacagctggtagataaaacgggtattcctgtagtcactaccttgatggggaaaggtgctattagttcacgtcatccattgtacttaggcaatgtaggcattcacggtggctatgcaccgaatgtggccattaccgattgtgatgtgatgatctctattggtactcgtttcaatgaccgtattaccggcaaattgagtacatttgcacaaaactgcaaaattgtacatattgacgtagatgccgcatccatttctaaaaatattaaggtagatattccaatcgtggcggatgcaaaactagctattgaagctctattagaatatattgaacctcacaacttaggcgattggccagctcaattgcaacagttaaaagaagagcgccctgttacgcaagctggtgaagaaggtcttacacctcaaaatattatcgactacattaataatcattatgaccgtccagtggtgacaaccgatgtaggtcaaaaccaattgtggactacgcaattcctcgaaatcgaaggcaatcatcaattgttgacatccggcggtttaggtacgatgggttatggattccctgcggctattggtgctcaatttggcaatccaacaaaacgcgtattcgccatttgtggggatgggggcgtgcaaatgaatattcaagaatttgcaacagctatgcattaccatttgcctgtgaccttggttgtcatcaacaatggctatcttggcaatgtacgtcagtggcaacaattattctacgataaacgctatgcatgtactaatttattgatggatgaaagcgctattgtcactcgtgatatgattgataacgatgaatttgaatatgtaccagactttgtgaaattagcagaagcctatggtgcacaaggtatacgtgttacaaaagttgaagaactagaagcggcctttacaaaagcggatgctttcaaaaaaggaccaacacttattgaatgtatcgttccaaccgagttaaatgtattgccaatggtaccagcaggtaaatcgttgagcgacatgttattaaaggataaaaaataggaggggctatggaattacatttagaaaaacgctgcatttcagcatatgtagaaaaccaaatcggcgtattggccaaaatttcaggcctcttcgctggtaaaaactataaccttgatacgttgacagtcggtgaaacagaagaccctaccatgtcacgtatgaccatagagctcacatgcgatgatttgacatacgaacaaatcattaagcaacttaaccgcagtgttgaggttattaaggttatcgattttacggatatgccgattacaaaaaaagaattactattcatcaagattaatagctgtaaagaatcggacaaacaagaaatattccgcattgcagaaacctttgaccttaaggttatcgactacaatcgaaaatccgtacttgtacaatgcgtaaaaacagtatctaagaacaatgacatgattgccttgtttaaggatatgttcgttaatcgcatcgaagtcgttcgtggtggtagtgtcgcaatagaggcattggcgactccggatcgctagtgacatataaacctagagtattcaggttgagtagcccatacttgctcgctccaccggccgggtctgacttcgcccttcgggcttcgcagggccaaagtcgctcgcgagcacggactactcaacactctcttcctttcggtttattactgtcactaagcgagccgaagtctatggacaggagagataggggatacggatatatggtataataaaatatcgaatgtattgaatatagagaccttgctttaatttagacaaggtcttttctatcaggaggaaatatgaggttacttgatgatattttgaagcacaataaggaatatgtagaggatcaaaatacaggatatgttgatgtagatacaaaatgcagtaagatgccgagccgtcagatggcgattgtaacgtgtatggatacgcgccttgtgaatttcttagaggattccatggatattggtcgtggtgaggctaagattgttaagactgcaggtaattgtattacaggaccttttgatggtgtcgttcgtagtttgttggtttgcatttatgagttaggtgttaacgaaatctttatcatcggtcatcatgagtgtggtatggctaaaactacggctaaagatttaacagaaaaaatgttagctcgtggtattgcacctgaggccattcatatggtgaaaaaggagatggaacattgggcggatggattcacacatcctgctgaaaatgtagaggaaacagtagatgaattacgtatgaatccgttgattcctaaagatgtgccgattcacggtctaattttccatcctagaactggtgaaattgaggtccttgtcaacggctatacacaaatgaaacaatattacgaaagatagacgagtccgtcattgaaaaataaatggagctgtagtagtatgcgtatgctattacagctcttttttcgtaaaacttagaaattcatataatttatagcttatagttctatgattaaaattaatgcatagcataacaaataaaaatacaaaatatatgtataaaacttgaataatataagcaatagtattataatacgtacataggttataaaaatacacaaatgatgtataaaatatacatacagtgtataaaggagataacgtcatgaatacattacaagatttaataaaaaaatatgcagcacaatataaagaacaagttatagcatggcgtcgatatattcatagtcatccagaattatctggtcaagaaaaagaaacatcgttattcattcaaaagattctagatgaattacatattccttatgtaaatgatgtttccgattatgcagtcatcggtgaaatacagggcactcacacaggccctgttattgcgttacgggccgatattgatgcattgccaatccatgaagagacgggactaccttttgcatcgcaaaatgaaggtgttatgcatgcttgtgggcacgatggacatatatcgattttgcttggtgcggcagctgtgttgcaatctattaaagatgaattgcacggtaccgttaaactcgtattccaaccttctgaagaagaggcgttatttcctggtgcacaaggcattgtggacagcggtatcctagatgatgtagatgaaatttttggacttcatgtatggcctcaattgccggtaggcacggtaggccttaagaaaggtcatcttatggcggcatctgatcattttctcgttcatattcacggtaaatctacgcatggtgcagaacctcacaatggtatcgatgccatcgtggctgcggcgaactggattgttaatgtagaatccatggtggctcgggagacgaatccaatggaaaatctcgtgtgcaccatcggggtaatcaatggtggtgaccgctataatgtaggttgcggcgatgtatacctcgaagggacttgtcgtacctacgaaccagcaaaacgtgactatattgaacgtcgtttaggtgaaagtttacaagctttggacatgatgtacaaaacaaagagtaccttagattataaacgcggccacggagcgacaacgaatgacccagatgccatcgactatgctacatccatcgtagaaaaataccttggcaaggacgccgtagtacatccagaacatccgtctatggcggcagaagatttttctgcatacttacacaaaatcaaaggcgcttttctttggttgggaaccggttttgaaggcaatccagcacttcataatgcagggtttaccattgatgaaaagattttagaatccggtattaccatgatggcggcactagctgcagaatatttacaaccgaaagagtagctttcacaaataacaaaaataaaattgtataaatatataccgtatagattgaaggagttatcatgaaaaatttacataataaatcatttaagacaatgctagattacacaccagaagaaattaaatattacttagatctagctgctaaattaaaggcagataaaaaagcgggcacagaaatcaaaacgatggaaggcaaaaatttcgtactcatctttgaaaaggattctacgagaacacggtgtgcctttgaagtaggtgcggcagaccaaggggcgcatacgacataccttggtcctacaggatctcaaatgaataagaaagaatccttaaaggatacggcgcgtgttcttggttccatgtatgatgctattgaattccgtggctttgaccaagaagacgtggatacattggaacaatattcaggcgtgcctgtatggaatggcctaaccgatatggatcatcctacacaaacattggctaatttccttacattgcaagaaaatatccataaaccattgaatgaaatttcctatgcctatgtaggccatggtcaatccaatatgtgtaacgctttgatgagcggtgccgtaaaaatgggcatggatttccgcctcatcggtcctaaacaattctggccagctggtccgttctacgaagaatgcttgaaggtagcaaaggaaacaggcgctacgattacgtgcacagataatgtggcagaaggcgtgaaaggccttgatgtaatttataccggcgtatgggtaacgatgggcgatacttacgatatgtgggaagaacggattaacctctttaaaccattccaaatcaatgcggacatgatggccttaacaggcaatccaaatacgaaattctgtcactgcttgccagcattccacaatacggaaacgcaagttggtaaagatatctttgaacgattcggcatgaatggtatcgaagtcacagaggacgtatttgaaggtccaaactccttggcattccaagaagcagaaaatcgcttacacaccattaaggcggttatggttgctacatttggcgattatccaatgaaataatagttagaatacagatgacgggagaggtcatctagcacgtatagtaaagaaggttatcatatgaatccatataaggtatttatcgtaggtcacgaaggaacgacgggccttagaattcacgaacggctatccggtcggaaggatattacattattatccatttccgatgaggaccgtaaaaatattgatgttattgcgagcattgcaaaggacgcggatatcgtattcttgtgcttgcctgatgctgcctctaaagaggtggtggctgctatcggcgattatccttgcaagattatcgacacatccacagcatttagaacggctgatgattgggcctatggctttcctgaacttggtgaaagctataaaaacgatattaaaacgaaacaacatattgcaaatcctggctgtcatgcaagcggcatgattgcttgcattgcccctcttatgaaagcaggtattgctccagcagattatcctttcaccattacatccctcactggttatagtggtggcggtaagaagatgatcggtcaatacgaatcggagccaaaggattatttcctttacgcaccacgtcaatatggccttagtcaacaacataaacatttgccagaagtaacccatgtatgtggccttacagaagcgccaatattcatgcccatcgtagacgattactacagcggtatggaggtcagtgttggcctacatacacgtctattagcaaaacctgttaccgtagaagatgtgcatgctgcactcgtagatttctacaaggatagcaccatcgtcaaggtagtaccacttaacttagaagaagacaataaacaattgttaaatgccaataaattaagcaatacagatggcatgattatctctgtaacgggcaataatgaccgcatggtcgttcactctatttttgataatttaggtaagggcgcttctggtgcagccgtacaatgtatgaacatcgcacttggattgccagaagaaacggggctttcactatgaacagtgtaacaaatgcaatgcgggcgcacatcttaacggcggccgttccatatattaaacaatatacagataaatacgtagtcgtaaaatacggcggcaatgccatgacggatccggaacttaaaaaatccgttatgaatgatttgctactacttcaattggtaggtgtgaaagtagtcctcgttcacggcggtggtccagatattaatagtaccttaaaggctatgaatattgaatcgaaattcagtaatggcttgcgcgttaccgacaaagaaacgatgaatgtagtacaaatggtgctggccggcaaggtcaataaaggcctcgtagcggacctcatcggctttggtggccgtgccgttggcctatgtggcgtggatggtgaactcattcaagtacacaagaaaaatgaagaacttggctatgtaggtgaagtcgatacaatcgatccaaagattatcgacgatgtcatcagtaagggatatattccggttatttcctccgttggttgtgacgcagaaggcaatgtatataatgtcaatgccgatacagcagctgcaaagattgcaggtgccctcaatgcggaaaccatggtggccatgacgaatatcgatggcgtactacgggatgtaaacgatcctaattcccttatttcaaagattactctcgctgaagcggaacagttgaaaaaagagggcgtcatcgctggtggcatgataccaaaggtagactgttgcttagaggccatcaatgcaggggctcaaaaggttttcatcatcaatggtgaaataccacatgccattctcatcgaactactaaccgatgaaggtcttggcacaatgtttgtaaagtaatatagtagatataacgatgataacatcatttgctatcgttacattgcgtatagatagacggcggctgggccgtacgcttggaggatatgatgagtaagacacaagattttgaacaacaagataaagagtatatagccaatacgtatggccggtttaacgtttgctttgaaaaaggcaaaggttctttgttatgggatgtagaaggaaaagaatacatcgatcttggttctggcattggcgttacagcatttggtgtagacgatgatgaatggtccaaggcagtgattgcacaaacacatgcattaaaccatatttctaatctatattattccgtaccacaaattaaattggctgaaatgttatgtaaacggactggtatgaaaaaggtgttcttctgcaactctggtgccgaatctaatgaatgtgccatcaaggcagctcgtaagtatagccatgacaaatacggcgatggtcgtaatgtcatcgttacgctcgttaatagcttccatggtcgtacagtaacaaccttgtcggctacaggtcaagatgtgttccatcaacatttcttcccattcacagaaggattcgttcatacgcctgctaatgatattgatgcggctttgaaagtccttgctaatccagcagtttgcgctatcatgatggaaccaattcaaggtgaaggtggcgttatgcctctcgataaggaattcgtacaagcggttacaaaatacgctcacgaacacgatcaactcgtgcttatcgacgaagtgcaaaccggtaatggccggactggtagcctgtatgcatatgaacaatttggtatcaaaccagatatcgtatctacggctaagggattagctggtggcttgcctatgggcgcaaccttattcaatgaaaaaacgcaattcgtattaactgcaggtgcgcatgccactacatttggtggtaacccaatctgtgccgctgcaggctgtaccatcattgaacggttaacaccagaatttttggctactgtgaaagctaaaggggattacgtaaaacacgccttagaagggaaaccaggcgttgttggcgttagcggtatgggcctcatgattggtatcgaaacaactgtagatcctaaagacgtcatcgctaaatgtctagaaaaaggcgttgtatgtttatctgctaaaaacaaggttcgtttattgccagcccttaatattccacaagaacaactagaaaaagcaattaccatcttggctgatgtaattggtgaattggctagcaaatagtcttacgttgacagatccatttatttggtatgaacaattgataaatatatagataaaatccgatgaatatgtagactttatattctattcgtgataacctagaataaatagtctatattggaggagtaaatatgaatacagaatccttacgtaatgatgtattggttcctgctgttgctaaaacattagacattgcagcaaaagcaaaaccaacaaaagatgagctctgcacaactgcaaaaattacagcagctgtagcggtagcaactgctgttgtatccttggcggtacaagcagtattgcgcaatcgataagagaagcataaagaaaacgacatggcattgcctgtcgttttcttttacatttaccctgttattcctataaatatggggatttccagtatattttgttaatctgtgctgaaagctaaggaggcgataccatgcatagtcgcgatttaattgaacaatataaaacctatgtacaagattggcgtaggtattttcataaacatccagaactcagtaatgaagagttcgaaacaacaaaaacattagccaaagaattagagtccatgggcgtagaggttcatgtggatacggaacgtggaacaggacttatcggtattattcatggcgctaaatctggtaaagcgattgcccttcgtgcagatatcgatgccttgcctgtacaggaacataatacatttgattttaaatccgatgtagatggcaagatgcatgcctgtggtcatgacggccatatggcgatattactcggtgcagctaagatgcttactgctatgaaagaccgtatcgaaggtgacgtataccttgccttccaaccggccgaagaaaccggtgcaggcgctcctgattttatgaagtttgatcattggtttgaaaaaatcgatgctatctttggtggtcacgtatggattgacttaccagcaggtctcatttccgttgaagaaggtccacgtatggcggctagcagtaaaattacaatccgcgtaaaaggcaaacaaggtcatggggcacaaccacatcaagctattgatgcggttgtcgtagccagtgctatcgttatgaatctgcaaaccgtagtatctcgcaatgtgagtgccttggattctcttgtgctcaccatcggcaatattcactctggttcagaatggaacgttatcccaggcgaagcacaaatgggtggtaccatccgtttctttgatcctgcacaagaggaccattatgtagaatctatacgccgcgttgtagaacatacagcattagcttatggtgctacggctgaattgatttatgaaaagaaagtgcctccaaccattaatgacgcagcagccagtgaactggctgagcgtgttgttatcgatacacttggtaaggaaaaactgtctaaaatgcgcaaggtgatgccaggcgaagactttgcttggtacctacaagaaaaaccagggtgctttgcctttattggtatccaaaacccagaggtaggcgctacctttgatcaccataacaatcgattcacaatggacgatagcgtactatctgctgcatcggcggtgtatgcggaatatgctattgcgtggttgaaagagaataagtaatagtattactgtataaaaactatagagcaccatcatcgtatctgatatgtaccccctttactggacactcagtaaagggggtattttcatgagatatagttatgaatttaaaaagaaggcaatagaattattctatcaaggtgaatggcccgaaacaccaaatggagtatcgcctcattcttttcatgaacaaataaggtattgggctaaacaagaggagttgcatggtccagatattaataagttttatggagtaaaaaagaattggtctacagaggataaatatgagttagtatgtcaagtattagctggggaatctttacgttccgtagctattgttgctggaattaatagtggtctactatatcaatgggttcataaatacaagactttgggatacaatggtcttatcaataagcctaaagggcgacgaccaaaggattctgacatgaaagtaacaaagaatatttcacctagacaactcaatgagagtgaatacgaggaactcattcgcttacgagctgaaaatgcttatattaaagctgaaaatgaagtcataaaaaaagagattgccttgagagaagaaaaggaagctgcgcgtctcaaggcgaaaaagcagcgattatcaaaacactccgaaagcaaggatatcaactaaaatatcttttaaaagctatgggaatggccaaatccacctattattttgagctctctaaagtggatcttgtagatgaaagaaatatacaacttaaagaggaaatccaaaagatttttacagagcataagggacgttatggtgtgcgtcgtgtatatcaagaacttcttaatcgaggttttatagtcaatcataaacgagtacaaagacttatgaaaatcatggggctcgcaggaaagagaccaaaagaaaaatatcactcttataaaggtcaagtaggcaaaatagccgataatattatcaatagagactttagtacaacagctccatttcaaaaatggactactgatgtatctcaatttaactttccatggggaaagtgttacttatcacctatcttagatatgaatacgaatgaggttatttcctatgacttggcattaaggcctaatttagaacagatttctcgtatgttagatagagctttcaaaaagtatcctaatctttcaggattgatttttcactctgatcaaggatggcagtaccaacataaatattttaggaacgcacttaaagaacatggaattattcagtctatgtctagaaaaggaaactgttatgataattctgtaatggagacatttttcggtaggttgaaaacggaaatatattatggctgtgaaatggaatatccatcattcaatgcttttgcgggggcaattgaagaatacatcaactattacaataataaaaggattcagaaaaaaacaaaatggatgccccctgtaaaatacagggaagcatccatgtgtttaggctagtaaataatatgtgtccaggaaaatgggtacatatcaatctgatgatggtgcttttgtcatgtatttttatttgtattttatgtatactataaatatataatacaagaattgttatatgagaggtatttatgaatatacttatatgtctcatcattattgctattaccggtatattactgatgaagcgctatcaacctcagccaattttgataggcatgggcatcctcatgatgtatatcgcctatgaaggtagctggattaatgccatattagatgaatctcagtctacaggcgttctggtgtttgatgcaatggatattgtgcggattacaacatcggagaatgtagtgagtttaggtcttatgattatgacctgtgctggttatgcaaaatacatggaacacattggggcaggaacacgcttagcccatacatttataaaacctttatatcgccttaatcggccgtatatagtgctagcacttatgtttctactcaatatggggctatccatatgtgtaccaaatccgttgagtcttgccttacttatgatggttaccatctatcctgttctgttgcgccttggcgtaagtcccataggggcagcagcggttatcgctacaggacatctgatggacgttgggccgggtgccgtttcgacattgctcattgctaagacacttaatataccggtaccaaactatttcgtaggttaccagttacgcctctatttcttagtcgctgttgttacagcagtagcacactttttatggcaacgatatcgcgatcgaatagatggtcctatggatgtaggtgactgtgaaagcatccctgaggcaccaattggacctaagctatatatgatattccctttgttgcctctatgtttcatcttgggctttagccaatatggcttgcctggcgtaaagatgaatgtaacccttgctatgatgcttgcttttggtattgctttattggcagaacttatccgtcatcgtaatttaaggaccgtccttaaaagtaccactgtatttttcgaaggcatggggaatcagttttcctatgcggtaaccctcattataggtggacaagtctttgcacaaggcttagtgagcttaggtcttattgattcgttagttagtgtactgcaaactttatctctaaattctgtgggacttacctctgttatggggggaggcatgctaggccttagcatggtaactggcagcaatgtagcacctttatttacattagtgccactcgtgcctaatattgtatctaatctcggactagatcctattacgaccatgctaggcatgcaaaatggggctagtcttggactgtttttgagccctataagccctgttatggttggtgtagcaggggtagcacatattaaatctgtagatttgcttaagcgcacctcggtccctgtacttgtggcactaattacgagttgtgtggggatatggatattatactgattccctagtcacatatcatttattgttttaaacatatgactgtttctctccttatattttataagtctaaatttaattaatataagtcatgtgttgttataatagttaatgtcattttctagcaatattgtaaaagtcttgaatgataaatgttcagttttaaaaccgttatatatcacatgaaaatctcccctttgctagtagttcagtaaaggggagatgtaacaacatttcaaatataaatattaaaaatcttaaatttctaatgctttttctagcagtgttgcaatatttttacttcgttcagtaatatttttttctaaccaaagattttgtactatatattgaggttgatattgggcttgtaattgtatacgctgtgcatcagttcctgaatttacagcagttgtaatggctttaacaatactacttgttactttatagtctgattgctcataatagatgctcttttctataaaatctttatttttagcagcaatattagctgatttatcaagtagagttagattaccaatacgattaatatactcagctttgtctttatcacttgcgaattgatagcgttgagcatcagcatcacgtggcataatatgttctaattcgattttccgtggtggagcgagaataattacattgtcattaaagtataattcaataaaacgaagtaatagagaggcttttttgttagcattaccagcagcacttgcaaatgatttagttggtaaaacaacttttagttgttttagattatctgaaattcgattttttaaatggtcttgtataatatcatattttttactatctgttttttcttttaacgcttttgataatgctatttccaattctttttcaatttggtttgtttgggtgaaggaaaataaaactgatgcgccgtatttaactgctaagtctaatatcttttcttttaagtcatcagaactattataaaatggtatcaaaagagagagcatctgttttaattttagtaaggtaaataaaataaagctattcttactatcagatacaaatttatttgtagtagtattttttataatactgctatatattgtggcactttcctttagtagttctgaaagatgtaatatctcattacttgttaattttttagtatcaaagaatgtgaataattcatcttgttttacattttttccatatgtacctaaaataaaatgtttagtaaaagaagatgtttgtattttttgttttgataatatattaataaaatggttccaattgttattgaattctaatttctttgtatctgtaatggaattatcactatagagtattttcataaaattactttttagtaaatccattggttcaagtgagcgtccacggttatttaaaacctcaaaaagttgaaatgccttttgttttgaatcggctgttgtcacaataagcataactttgtcttgtatgtatttgataaattttttaaactcaatatctcctaattgtctaatttcatttacacgctcacataatgtgtcaaagactagatttagattttcgtcagattcatttaatgatttagttgtagagataggttgatcagttatgattgatttataagtatctccaaatcctaaactaggattatgtaaaattcgtaatcctttaaatgcatcattattatcaagaaattgaaatgctttatctatatctgccataacacgataccaattatgagcattttgtgtatcattttgttgaagtgtctctaatgtaatgaatatagctttgaataagagtgttaatgtggttagtcgttgttgaccatctacgacatcgacggtattttcatcttcgttatttattaatactatattacctaatagatagcctggcaataaatttatatcaaccgacaaattatcagtatcctcgagaaaatcgttaattaaattattggcttcctcatcagtccaaacaaaagctcgttgaaaatcaggaatgagaaactgattagaagaacgaactaatacttgagataaaggttgcatttcggatgttattttggccatatgattatcctccttatatcattattagatcatataattatatttaagatcaatagttgaatgaggaaataatgaaaaagtatgtattgggtacttagaattaaaataatcaatactttgtgtggaaattctttaaccatcacaaaacgccccattcacagcaaccatctacggttgccaatgaagagggcgttttgcattgtagtaagaaagttagtaaacatttagacgggaatctaaatgtatgtatataaggccatacagcttacgataagagggggaagtagcatcctatgggagtagtattgcataaaaaggggaaatatattaggatgcgtctctcatagatatgtaagggatatacaggggagatatctatggttgtacaactatatggccgtatataacggtatgtaatataaattagaatttatgagtaaatccagcgtttacaccccagtcagcttggtaatcaccagatagaccggtagtaacgtccgcatatacgctgttgttagtattgaaaccataacggccgccgaatgcgagttcagtccaagtgcctttgaggtcttgttctgtcaattttacggcattaccgctagcataggtagttttcatgttgcctgtgaaagcatgacctgcagcaaagcgtgtatataggttaccattgccaaaatgtttgcctacttcgagacctagtttgccggatgtgctatttacgccagcttggttaacggatacattgcctgctgtaaagtcacgaccaccgaagtgtgtatagtttaattgtgcttgtggttctacatagaaaccattagcagattttatagttttgccgtagcgaacgccgatgctatacgcattggattttacatcaccagatttagcttggccgatttcattacgcgctgtaaatttattagagatacgacctacttgagattctacatgtacgtattgatccttaccaaggtctttcaatccataagcgccaacagcataggattttaccttgccagaaccattgaatacataatcttcagaaccgcgtaggtaagaaacttggccgcctacggtccagtcacggctagttttcgtatcatagccaccttggatgcttgtgtaatcagtagctgtattgataccgtcattagcataattatatcgaccgccaccaatacgagcccaaatacctgttggggaaccttgttgtaattggttagcacgattcatatcgctcgtcattgtacgccatgcgttgatattaccaactacagcagaacgaatgccgcgcatttgtggtgtatcgtaagcacctggagttatcggagtaggtgccggtgtaacaggagttacaggtgtcacagggctaggtgctggagttaccggagtaacagggctaggagccggagtaactggagttacaggtgtaggcgctggagtaaccggagttacagggctaggtgccggagtaacaggagttactggtgttggagctggcgtaggcgttggagtaggagccgcataggaaccttgaccattaccgttttgccatgtaatagtaccttctttttggtctgtagttaacgctttttggaagcttgatacgatgccattagaagcgatggatacagtaccagaaaggtttctttcaccattcatataattatcgtaatagaatttatgcgccaagttatctagaatcttgtttacattgctttcagaggacgtatcgagatgatcgcctgttacatagccatgtacaccagaccctgttgtagcggattttacgatgaagttaccgccttcgatgtcagatgcatcaaggcctgttttttgagcggctggtttagcgaagttcaaaccagtaccagcgctcatatcgtaaatgacattgatgtggccgtctaaattattaacgtggatgtcgctacgagaatcttgggaaatacggctgaatccttcacgtgtacgagtgcctttgagtgtattgatactgctgcgcgcttcgttgcctttaatttggaatgcttccaagccgcccatgttatcgtggctccacatgccaccatcaaaggtcatgttgatttcgccacccttatcctctaatgtgttcacagccttgccggtaaattggttagggctattgtgcgcacggccgaggccaatattaatcacggatggttgctgttgttggtatggaggcatcgttttatcagatacaagtatattaccttgcatattaaatactttatgttttacagtacctgaatcatcgataccaagattaattttactgttataggcaaatgctagtggatagggtgcgtcccatggggccgtattcacgttcataaccccgccatccacttgaatggaactattatctagcatgcctgtaatgaaagctggttggcgatggcgcttaggtaattggttttgatcaggcgtatctaaggaggcaatagtcacttgaccgccgtttgatgcaatgacacctgttgccgtcgtattgccagtgctttcaaatttactttcagaacctactgcaaacacattgccattagaaccaaggcctgctgccgcccacgtgctagggagggccactgtagatgacaacatggtcatcattacagcggacaataacatcttatttctcgctctcattctcttacacctcaactatattacttaatttgtaatttatttttatattgtgaaagactcttcataaatgaatatatatctatcggttgatttaatactctcttatataatgaaagatagatatatactcgacttataaagactttgtgtcagacacatttaaaatatatttaaaataatataacatttttcgtgaattgtaaatgaattttcataattttattttaaaaatatttaaattgttaatagatgagttacatattaggggcagtgaatacgatgtatggtattctttacaaatctagtgagcatgggtattattgtatgtatagcgcgatttctagtaacaggctagttgtagcatagaaaggagccttcatgaaattcacttgttcctggcccacaacgccactgtatcaggcgtatcatgattatgaatgggggcgtcctattcatgatgaccaacatcaatttgaacatttatgtttggagagcctacaatgcggtctgagttggcttacgattttaaataaacgagacattatacgtcagtgttttgactattttgatgttgatgcagtagctaaatatacggaaacaaatatagagcgtattatgtgtacagagggaatgttaaaatcccgcaagaagattgaggccatcatcaacaatgcacaggcgttccaacgcattcaagacgagtttggatccttttgcgaatatatatgggatttcaccaatcataaaactattatttacaaaggccatccagagggaagggtgcctgctcaaaatgaattgtctacgcgcattagcaaagaccttaagaaacgagggttcaaatttgtaggacctgtgacaatctattcccatttacaagctagtggtctcatcaacgatcacggtaaggattgcccttgttttaatgaaatcaatgaggctaatcctgtggtttatatgaccatagatgattaatataaatagaaccgtatctactgaaacatagatacggtttttttgtgatattttatattgattgttatcgatgtagttgatatactactttcataataactttcagaaataaggaaaaggatacaagtatgattgggttaggaacggccatcaacatggggctcattgtcggtggtagtattattgggctcacgtgcggccgatttatgaaggacaatttaaaacaaacccttatggtagtatgtggtatcatcgtgctgttactagggatgagcggggccatgcaatttatgctggttatcgttaatggttccttgcaaactactggacctttgttgatgattatcagcatggtagttggtgctgtgattggtgaaatcattgatttagaccgatggattacggtctttggtgactgggtgaaagataaaaccggtaatacaggggaccctaagtttacgcaagcgtttatcactgcatcacttacgtttacggttggtgcgatgggcgtgctcggttcaattcaagatggattgacaggagattaccaaaccttgctactcaaaggaattcttgatggtgttatcgttatggttatgacctcatccatggggaagggcgcattgttttccttcattcctgtaggtatcacgcagtggttgatcacggccttagcgcatgttgcggcgccacttatgacacagcaggctatcgacaatttatcctatgtaggatccatcttaattttctgtgtaggcattaatattatttggcctaataagattcgtttagctaatttattacctgctatttttatcgctatgggccttacgtttttaatttaaatttaaattttaagaaccctctttacattatgtgtaaagagggttactatattctcaatataattttcttgtagttaaaatggtttcccctagaaacgcatgttatcgcggtctagcggatacaaaagggcctttcttcgccgaacggttctagaaaccagaaaggacatgatgagcgaacaagtttctgtttcaaaatctaatattcgtggtgcatttggtgcattttttattcctggtatgtacaccgccttatgggccggatttgtgccatatttaaaagcgaaactaagcatcggtgaggatgtattaggttccatgattttgttgctcggtgtaggttcttgtttatccatggctatagctggtaaacttgtagaaagctttggctgtaagcgagtcgttttattagctagttttatcggcatgttgtctctggctattgttaccatgtgttctacaattgtgacaaccacaatagcattatttttctttggcattggcgtaggccttagtggtgcttctgccaacttacaagctattttaacggaaaaggtaagtaaaaagcatttaatgggtgcttatcacggtgggtggagcttaggtggctttgcaggtgccggtgtattgcttgttctcttaaaaatcttatctttacctgttaatgaaagtatttggggccttctcatcatactctttattgcgatgattgcgattagtcaatttatgttaacctttggtcgtgatccaaatgcaaaggttatgaagaagtctaaaagtccgttatcattccatccaattgctattatctttggtctcttatcctttgtatcctatttggtagaaggtgccgtaggggactggagtgcgctttacttatttgaagataaaggcattgttattcaagaagctgtaatgggcgttatgctgtttaatgggactatgtgtattggtcgccttcttggtaatacaattggtaaacatgtaacatctaaacaagttgttgtaggtggttatctactaggtgctattgcaatggcactcattgtattcctacctggccatgcgtctatgtatacgtacttattattaggtatctcattagccatggttgtgccaaatctattctctgcgatgggggaacaaaatgtaattcctatgacacaagcagtggctacatctaccatgctcggttatatggggattttgatgggacctgcattgattggattcattgctcatggtacgagtcttaccattgcattcatcgtcttgactgtattgcttgttatcagtgccggcattggtaaatatgcatattatttaatgaataaaaattgtggtgtagaagaatagtttcttcgtttaaatgctgcaaataaaaagaagaggggctacgattcgtatgaatcgtagcccctcttagtatgttagtaaccgattagcggtcgccgttaaagatggagtttttaacaagaacgtagtctactttgcggatagcttgtagtgttgtgccaccagcgtaggagatagcggattgtaaatcttgttccatttcgattaatgtatcgaagatagagcctttggaaggaatgaagatttttttgccttctacgtttttacgttcccctttttggaactcagaagcggaaccgaagtattcttttacagcttggccgtcaacaattttttcttcccctggagattcttggtgaccagcaaatagggaaccaatcataaccatagtagcgccaaagcgaatagatttagcgatgtcgccgtgatcgcgaatgccgccgtcagcgatgataggttttgtagctgcttttgcacaccaacgtacagccgccaattgccaaccgccagtaccaaagccagtttttaattttgtgatacaaaccttaccaggaccgatacctacttttgtagcatcagcaccagcattttcaagttcacgaactgcttcaggagtacctacgttaccagcaataacaaatgttgttggtaaattctttttaatgtattgaatcatgtcgataacagcattagagtgaccatgtgcgatatcgattgtgatataatcaggaataaggttagctttcgctaattcatcaactaatgcgaattcttcttcctttacaccgatggaaatagaagaatataagtttttttcttgcatgcgttttacaaagtcaagacggcgttcaggttggaaacgatgcatgatatagaaatagcctttttctgctagtttttcagctaactcttcatcaatgatagtttgcatgtttgcaggaactacaggcaagttaaatgtacgattacctagtttaacatgagtatcacattcgctacggctgtttacgatacatttattaggaatcagttgtacgtcttcataatcgaagatgttagttgtattaatcatagtttctatatctcctttgaggtataataaattgaacctgtaccattatactgaatttgttttcaattttcaatacattccgaatattaaaaacactcatatagttattatacaattttataggtagcttgtctgtacattttctctatgtttagcccattatatacacattatattaataggaggttattttaatggagcattccaagacacgcatgatagcagaagctggtgtagctattgctattgcacaagtattatcttttattacactttttcatatgccacaaggcggttccattaaggccgcatccatggtacctctcatgatttttgcatatcgctggggtggtacacgcggtatttgggctggcgttgtatatggcatacttcatttcttgctcggttttaaatcatctatccattatctaagcatcatcctagactatcttgttgcttacggtgttattggtgtgtgtgggtatttcaaggacaatatgacaggtcttgttagcggatctattgttgctattgcgcttcgttggtttgtgtccgtaacaagtggtgctgttgtatttgctagttatgcaccgcaaggtcaaaatccatggatctactctatgatttataatgcatcttatatggtgccggatggaattcttaatattgttgtgttgttgtttatttaccaaggggtaaaaagagggttgaaacgcggtgcttaatttaggcgtaattattttggccggtggcctaagttcacgcatgggatatcctaaggctttattgccttggacgaatggtgaaagcctcatttctcatgcgttgcgcaatgcattagaacatgatgctaatgacattctcatttctatcggtgacgatgaaagtctaggccaagccattcaggctaatattatcgacacattgtcgaataaagagaaagaaaaagtttctatcgttcgggattctgttcctcggagtggtccattaggcggattatatagcacattggccgtaggcaagagtcatgcttatgcagtgttagctgtagatatgccgtttatggattttaatttatattatgattggctctaccaagtagatggtgatgattggaatgttattgtgcctgttggtgaaagtggacgctatgagcctatggcggggatatataagccatccattgctccattattgcaaaccactttagcaggagaggatgtatctttgcagcatgcattagatactgtaggacctgtggtaaccattgatgcaggtgattacggtcatcatttacgcaatgtgaatcatatagaggattataagtggtcccgcgcagaggctgttaatgcgaatcgtcatgttccacttatcagcgtagttgctgaaaaacgtaagactggtaaaactacggtggtaacgcgactaattaaggaattagaacaaattggtttctctgtaggcgttgtaaaaagcgataaacatggctttcacatggattatgaaggaactgatacggatcttgctatgaaagcaggcgccacggccgtagccattgcaggccccacggaaacggccatacgcatacgcaccgaaaaacaatctaatctgtatgatttggtacagcaattacctgtagatattgctatactagaaacgagatctcaaggtatatttccgattgtagaggtaaccagagccgggtataccgaatcacttatatctagtgatatagaacgcgtagagaccatagaggttactaaattagatcaatgtttaccagcgttggtatgtcgaatacaaagtatgatgaggaatttagatgatagccgttactgttgatgaagcgcttcatttgtggaatgaggctttacgagaacaacatcatagcattgaatccattgccgttggcgacgcaaaaggatgtgtgttggcagaagatgttttggcacctaccgatgtgcccgcttttcataaatccgcaatggatgggtatgccttagcatatgatcctaattgtgatacctatatcgtcgatggtatcatcggcgctggtgtcgtatgggataagcctgtaacgactggtcatgccgtacgtatcatgacaggtgctcctgtacccagtacttgtgatacagttatcatgcaagaacaggtgaaaggtattggcgaagtaggggctacgattactatacaaggtacgcaacaaaagggtagccatattatccctcgtggtgaagaatgttccgcaggaaccgttgttattccaaaggggacagaaataacctctacggtgcagacaattttgatcggccttggttgcatcgatgtgtctgtgtatgcgatgccacgtatactggttcttacatcaggccatgaagttattgagccgggcgaacccttaactgcaggaaaaatttacaattcaaatcgcatgatgatttgtagtttacttgctgatttaggttttcggcgcattacccattatcatgtgagcgatgcaccggatagactagatgcagaaattgaacgcgtccttgaactcagtgaacaagcagatatcatcatcagctcaggcggagtatctgtaggtatgtttgatacaatgcctcttatatatgaaaagttaggagctaaaaccttatacggtcgtatccaaatgcgtcccggtgcagcctcctatggggccgttacgcctaaaggtcaacttatctttggtttatcgggtaatcccggtgcagcctttaatggttggcacctattagtggttcctaccttgcgtagatataaaggtattaaaaattggtccaccccagtacttaattgtgtaatggattgcgatctatctaaacgtaatgcctttgatcgctacgtgcaaggcaaggtcgtatttggtgatggacaacctcgttttgtggcaaatcgtcactttaacagtagcagcatgcttggattatataccgttaatgccttagcctgcattccgcaaggcgtacatgaggtacatgaaggagatatatttaaggtatatttgctaggcctcttaccaacaatataataaattgcaagggactcatgtatgagtccctttttaaattagtacaggcctgtactaatttgtggaaccatatgtataggcttgttacaaatagaacaggcctgtactaattctaggactgcatgtataggatcgctgcgaatagaacaggcctgtactaattctgaaactatatgtatgggcatgctgcgaatactacaggcctgtactaatttgtggaacagtatgtatcggaatagatattaaaagatattattgaccacagttaaataaatatatgataatgaaaacatctcataagttagaagagatgctttttgcatatggagcggttaagatgctatggattattttgattatacctataagcacaattatattgagtttagcagtagtatatataaggttggtacttatacttacaattggcacgggggaacagagatttttattctcttaaagggtcgtgttgagatgagttgtaatgataaggtttttacgatggaacctcttgatgttgttattatttctcctcaggtgggtcattcaacactcgctcttgaagaggatgtggttgcctttgttattcaagtaggtaatgaattttatcaacagtatgattcggattttggcatgtatgagtttgttattcgttcggatgcgagcacacgtcgtaatgaattttttacgacattacgccatcatgcggccatgacgatgttgttaatgaataaaggtgaaaacccaattcatcgtatgtggatagagcatcattacttgtctttagctggggatgtatttagagaatttgatccagtcaaaaaaattcatgaaaatgcaagacctggtgatattaaaccggctacctttgataaaatgattgagtatatcgacgaacattaccaacaaaagttagaactagaagatattgcgagaataggtggctataatgtggcctatacatcacaattctttaaacggcaaatgggcatttcttttgtggactatgtgttgcggttgagactgcgagatgctacgacacaattaactagtacggatgaggctgttgcaaggattgcaagtagttgtggatttgcagatatcaaggcctttaatgtagcatttaaaaagcattttcatatgacgcctacagaatatcgtaagcaagtgaaagaaattggacgtaaaacaatggtacaagattcgaaggaaattatttcggttgaaaatcaagatgtactagacctattacaatcattcttgtcttatgaagatgatgctagagcaaaggcggagttagagtacatgagccacaagctagaatcattgaaagcgaagcttgccgatgttgttagcgaattataattactatctatagtatggtgtggcaatgatgggacttttgctgttcatgcaaaatattttttgtagcatatagaaaaattagacctaggtgattttctatatatttaaaaatcatatatttcttagaagagcattactgttgatatgtagtgctctttttataggaaaatctatagattttagattgatcaaaatgagaaaatagtgatgattccatatgttttctatgattttacctaaaaaattaccttttaatatggatagttatatcgaccaaaacgagtagaatatgattcatcagataacaaacacgtattgagttactaattttggaggatataatgactcgtattaaattcatggaaaacgtaggtaaagttgcaacagttacagcagtagcaatgtatgtatcttatttcccacaaattatgaacaacctagctcatccaggcacaggcgattggatccaaccattagtagcagctatcaactgcacattatgggtagcatatggcttgtttaaagaacatagagatattccagttgcattggccaatgcaccaggcatcttcttcggtttagcagcagctattacaactcttatgtaattttctacataagcgtttcacatcgagttctctttcgtgggacttgatgtgacttaatcaataaataatcttaagatgctgttgaccgtttttaattatatgtatcataataaatgcatcccttggatttattagggatgcatttttatgttagaagatgaggtaattatggattacttttactatacatataaacataatcatatagatttcagtagccatatatacaaggttagtacctatcattacaattggcatggagaaacggaaatccttattttattaaagggccgtatcgagatgagctgtaatagtgaggttttcacaatggaacctctcgactctatcattatttctccccaagtggggcatgcgacgttggcattagagcaggatacgacggcattggttattcatgtaggtaaggatttctttcaacaatttgatccgaactttggaatgtatcaatttgtagtacgttcagatgaatcgaatcgtcacaatccgttctttacctctttacgacatcacgcagccatggtgatgttgattaagtctaatggtgaaagccccattaatcagatgtggttagaacatcactatttagcattagccagtgaggtatatgatgaaattgatgcggttaagtctattcatgtacattctaagcctgttgatatgacggtggctacctttgataagatgattgcctatatagataaaaattatcagcaaaagattgaattagaagatattgcccaaattggtggctataatgtgaactatacatctcagttctttaaacgccaattaggcgtttcctttttagagtatctcttgcggatgaggctaagggaggctacagtttgtttagctaattctgatgatggggttgctcatattgcaagtagttgtggctttgcagatattaaagcctttaatgttgcctttaaaaagcgctttcatacgacaccatcagaatatcgtaagcaagcaaaagagttagggcgtaagaccaaattacatgattggaaagagattatatctacacaagaggaagatattgtagaactactacaatcttgtttgccttatgaacatgattctagttataagttaaagctagaggaagcgaatcaaaaattacaagttgttagagaacagcttgaatctgttgttaaaaaattacaatcctaaccttaattagtacagccattgtaaattgttataattttatggttttgcgttttaaatttagggagatatacaatcattaggtataggtaattttgtatatactaaaaatcccagttcctaaatataaaaagagcactgcttttcaataagtagtgctctttttcgtgtttataggtaggtaaaattatatattttatatgcgttaaaatttacttatataggtgattcattatgattttatagggacttcactctcaaaaatcaacttgtatattggatagttatatcctgaaaaaagagtacaatgaaatcatcgaaaggagctaaggttccgatacaaaataaatgctaagttttaaataatgaagtcctgttggaggtttacgatgagtacgaaagaacaacaagtacaagagatgacgaatgtcattgctaagttcattgcttatatggcaaagaaattacctgatgatgtggaagctaaaattaaagaattggcagccgatgaaaagaatccattagctaaaacaatttatgaaacgatgcataaaaatatgaatcttgcgtatgaattgaatcgtccttcttgccaagatacaggagtattgcaattctgggtgaaggttggttctaattatccattgattggtgaattggaagaaattttgcgcaatgccacataccaagctacacaagatgcaccacttcgtcataactgtgtagaaacgtttgatgaattcaatactggtaaaaatattggtcgcactgcaccttacattacatgggatatcgtacctggtcgtgatgatgtagaaattttcccatatatggctggtggcggttgctccttgccaggatctggtaaaacattgatgccaggcgaaggttatgaaggggtagctaaattcgtattggacttgatgacaagttatggtttgaatgcctgtcctccattattggttggtgtaggtattgctacatctatcgatacagcagcaactatgtctaaaaaagcattgatgcgccctgtatcctccaaagcagataatgaaaaagcagcgtacatggaacaattacttgaagacggtattaatgcattgcaccttggacctcaaggtatgggtggtgacaaatctgttatgggtgtaaacatcgaacatggttctcgccatccatctgtaatttccgtagctgttaacgttggttgctggaaccatcgtcgcggacatatggtatttgataaagacggtaagtacgaaattttatctcacaaaggagtgacattctaatggctaaacatattttgacaacaccaatccaagcatctgatcttaaaggaattaaagcaggggatattatttacttaaatggtcacatcacaacatgtcgtgatgtagctcatcgtcgtcttgttgaatatggtcgtgaattaccagtagatgttcgtaatggtgccattttacatgcaggtccaatcgtgcgtgaccatggggatgataaattcgaaatgatttccgtaggtcctactacatctatgcgtatggaaaaattcgaatatgaatttgtaaaacaaactggtgtacgccttatcgttggtaaaggtggcatgggtcctgaaacaacacgtgcatgtaaagattttggagctcttcactgtgtattcccagcaggtaatgccgtacttgctgctacagaagtagaagaaatcgaatctgcgaactggcgtgaacttggtatgcctgaaaccttgtggacttgccgtgtaaaagaatttggtccgctcatcgtatccatcgatgcggaagggaataactactttgaaaataaaaaagtagaatacaatgcgaagaaagatgaagtgttagaagagatttataaacatgtaagcttcattaaataatcgaattgtgaacttcaatttaatagggggattatacggattttgtacaatcctccttttttatacccttttttagggatattacacgtattgggaggtatgtatggatacgagtgtaatgataactcttggcttcttggtatttgccatcgtcatgtttgcatgggagaaaattccattatctattactgctatggttgtagcagtaggtttgcacttaagtggagtcttatccgctaaagaagcattcgctggttttgtagatccaaatgtcttactatttatgggcatgtttgttattggtgaagccttctttgcaactggtgtagcagtgggggtaggtaatgtagttcataagtttgccaaaactgaaacgtctttgctagttgctgttatgatgattacaggtatattatctggtttcttatctaatactggtacagctgctgtactgattcctgtcattatcggtatttgtaaaaaaagtggttttaaacaaactaaattattaatgcctcttgtatttgccgcagctatgggtggtaatatttcacttatcggcgctcctggcaacatgattgcgcaagcgggcttacaacaagcgggcctaggctcttttggtttctttgattatggtctagtaggtttgccaattctaattgttggtactattttctatgctacaattggtaaacgtttcttaccagatgctccaagtcatcaaccagatggtgcctttgaaggtaatgatgattatagccatgtaccatcttggaaaaaatggactgctgcaatcgtattaattttgacagttggtgctatgatctttgaaaaacaattaggtgtaaaactttatgtaagtgcctggataggtgcgcttgtattagttgctactaatgttattagtgaaagtgcagctgttaaatctatagatatgaaaacaatcatgctcttcgctggctctatggcccttggggacgcaatggttaaaacaggtactggttctgtaattgcagatattatcgtaaatagccttggtgctagtccatctccaattattgttctagtagtaatctttgtgcttggtgtgttcatgacgaacttcatgtctaatactgctacctgtgcattattggtaccaatcggtcttagcttagcatctcaattgggattcgatccaaaagcagtgctcgcagctatcgtaatcgctagctccttagcgtatgctaccccaattggtatgcctgcgaatactatggtatataatatagctggttatagcttcatggactatgtgaaagctggtttaccactcattgtcgtgtctagtattgtagcattagtattattgccaatcctattcccgttctaatatgtacaaagtaattttatatagtaagtgatattaaaccgtcaccgttggtggcggttttattttgttgaactccttagactatgtgtgccttagcctattgattagaaagagcaatatacatataagtaagaaatgattagacataatccatactttcacatataatagaaaagtaacgagtgtacaaatatacattcacagtagacaaaacaggtggatatgaggaggaattatgcttaccgatattgaaatagctcaacaaaataagatggaaaaaattcaggttattgctgataaatgtggtcttacacctgatgatatagagcaatatggtcattataaggcaaaaatttcttttgatgccattaagcgtttagaaaatgaaaaagacgggaaattagttctcgttacggctattacaccaacgccagcaggggaaggtaaatctacaactaccatcggtttggtacaagccttgaataaaatcggcaagaatgctattgctgcacttcgcgaaccatcattgggacctgtgttcggtatcaagggcggcgctgctggtggtggctatgcacaagttgtaccaatggatgatattaatcttcattttaccggtgatatgcacgccattacagcggcaaataatttgttgtccgctatgattgataatcacatccaccaaggtaatgagctccaaatcgatttgcgtcaaatttcttggacacgtgttctcgatatgaatgatcgtgcattgcgcaatgtaactgtcgcactggggggcaaggtatgtggtttccctcgggaagatcattttatgattaccgttgcctctgaaatcatggctattttatgtttagctaaggatttagaagatttaaaagcgcgttttggtcgcatcgtcatcggcccaaatcttaaaggtgaaccggtgtatgtacatcaactcggatgtgaaggtgcgatggcacttcttatgaaagatgctattaaaccaaatcttgtacaaacattggaacatacgcctgccattgtccatggcggtccatttgccaatattgcacatggttgtaactccgtagtggctacaaaactcggaatgaaacttggtgatatcgtggtaacagaagctggattcggcgctgatctaggggcagaaaagttcctcgacattaaatgccgttatggcaatatcttcccaaatgctgttgtcatcgtcgctacattgcgtgctcttaaaatgcatggtggcgtgtcaaaacaagaattaaatacagaaaacgtagaggctgtaacaaagggcttcagcaatttgcgtaaagctattgaaaatatgcgcttcttcggtgtacctgttatggttgccatcaataaattcgttaccgatacggatgcagaaattgctgaattaacacgtttgtgcaatgactatggcgtgcctgtagagctcaatgaatgttgggaaaaaggtggcgaaggcggtatcgatatggctaaacgcgttgtggaactcgtggaaagcagcgaaccaacacctaaattcgtatatgaattaacagatagtattgaagataaaattggtaagatcgttcgcactatttatggtggtgatggcgtaacatttggggcaaaggcgaaaaaacaaatcgatcaattaaaagaatggggccttgataatctacctgtttgtatggcaaaaacgcaatattccttgtccgataacccagctctattaggggcaccaacaggttttacaatcaatgtaacggatattcgcgttgctaatggtgcaggattcctcgtatgccgcacaggtgatgttatggttatgccaggtttacctaaacgtcctgctgcacttaacatggatattgatgcggacggcactattaaaggcttattctaataatatggtattgtaatcgacatagtatttttattgacatagtatacagaaggggcgatggccccttttgttattgaggagtatatatggatttattgacgagttctgtaaaagattttgtagcggcaaccgcttcaaaggagcctactccaggtggcggtgctattgcagccttgacggcagccacaggcgcagcattggctgaaatggtagcgaatttaacatttgataaaaaaggatacgaagatgtgcaagaggagatgcatcttttacaacaaaaagcagagtttattcgagagaaagcgctttcactagcacaagcagatgctaatgtatttaatttgtttatggatgccttggcattgccaaaaaatacggatgaagaaaaattagcgcgtactgctgcgattcaacaggcttataaggatgcggctaatgtacctttagaaataggcatgataagttatgaaatatttgatcttgcctatgttgcggctacgaagggcaaccaaaatctcattaccgatggtattattgcagctattaatgcaagagctgcggtaaaggcagcctttttaaatgtgcgtatcaatatatctggcattaaggatgaaagctttgtagctgatttgaaagcgcaaatgaatcaaatagaatctgaactagacgaaaaggaagcatccgttttagccttgtacaaataaatggacgataacatacttttacactaagaatgttcggaaaaaaataaaatagaaagccttagaaaataaaatttctaaggtttttctttttctattgttaaaatccgaataataacgtagaatataagtgtaatgtttgtagtttagaaaacaggagaccattatgtcagaacaaaacaatactgttgactctatgttgccaatacctaagctgtttgcctacggtttacaacacgtattagcaatgtatgccggtgctgtagcggtaccaatcattattgcgcaagctatgcatttgcctgtagaggatttaatccgacttattacagcggacttatttacttgcggtattgccacacttattcaaacattagggtttggtaatattggtggtcgaatcccgatgattcaaggcgtaacctttgcctctgttggacctatggccatgatcggggcccaacatggtatgaccgccatttacggtgccatcatcatagccggtatttttacattcttagtagcaccattttttagtcgtttgattcgacttttcccacctgttgtaacaggcaccattattacaatcattggtattaacctcatgcctgtagctgtaaactggatggggggcggtgtaggcaatccgcagtttggtagtcttaccaatatcggtctcggattccttacattcttaatcgttatctttacttataaatttgccaaaggttttcttggtaatctttctgttttaattggtcttattggtggtacggctattgcctttgccatgggtgtagccaattttgctgaggttggcaaagctcattggctggctgttattgaaccattatactttggattaccaacatttgattgggcctctgttatttccatggtagttgttatgctcgttgttatggttgaaacaactggtgatagtatcgcaatcggtgaaatcgtagataaaaaaatcgatcgtaaggaattggcatccattatccgtgccgatggtctttccactgttattggtggtattcttaacagtttcccatatacagcatttgctcaaaacgttggtcttatcgctgtaacacgcgttaaaagtcgttttgtagtagctgcatctggtgtaatcttaattctattaggcttattccctaaattggcggctgttgtagcaagcattccaaatgcagtgctcggtggtgctggtattgccatgtttggtatgattattgctagcggtatccgttctcttggtaaagttaattttgatggcaatcaaaacttgatgcttgtggcgattagtatcggtgtttccatgattcctatcgctgcaccaacattctatgcgcatttcccagcatgggctcaaattttattaaaatctggtattacattcggtagtatcatggctatcctccttaacctattgctcaatggcgtgaacaagggcgatgaattcaaagaaatgggtcgtcgttaatcggctttcaccattattaatactaagaactctactcgtagtgggtagggttctttttttgaaagtaataatctccaaatagtgactaaactcacaggggttacacctatatactatggtataataaattgataaatttagataatttgttcccataagaagggaaggagtttatggctgaaggtaagattattgccatctcgattagcgagaaaaaagggcaaaagaaacataatattgaatctgccaatctcatcgtagatcacggcatggaaggcgatgcacacgcaggtaattggcatcgccaaattagtttactcggcattaagagcattgagcatatgcgtgaaaaaggggccgatgtaaaacctggtgattttgctgaaaatatcaccgtcgaaggcattgttttgtatgatttaccggtcggtacgaaattacaactaggtcctgaggtgttattagaggtcacacaaattggtaaagaatgtcatcatggttgtgaaattatgaaacaagttggatcttgtattatgcctacgcaaggaatttttggtaaagttctaaaaaatggtacaattaacgtaggtgatgacgtatccattattaaataaggatgtaaagaggtgtgctatgaaggatgcatggggccgaacaattgaatatgtacgtctgtcgttgacagatgcgtgcaatttttgctgcccttattgcagaccagcagagattacaccacaaagccaacatcaactactatctgtggatgaatggatgactattttaggtgcgtttcaccaagtaggggtgaaagctgtacgcctcaccggtggtgagccgttactatatcctcatattgaagagttattagcacgtatcaagcagaccggatggtttgaagatatttctatgacaaccaatggcagtctattggcgccgcgggccgagaaattgaaagaactcggtttgaacagagtcaatattagccttgattcccttgatagcgacgcttttgctctatgtgtgggcaaagctgaccaactcgactccgttctaagtggtattcaaagtgctattgatgcgggctttacttctgttaaaattaacactgtattatcccgacattggactgatgatgaagttcgtgctttactaacatatgtggaaacttggccggtgatttggcgctttattgaatatatgccatttcagggcgatgcgtttcatgggccgaccttcgatgaatggaaggctcaattagaacgcgtcagcggtggtatcctcactgaaaatcacggtgtgtacggttttggacctgccacgtattacaatttaccgagtggtaaggagattggttttatcttctccatgtctcatagttattgtgatacatgcaatcgcgttcgtcttacttcggatggtcaaatgcgactctgccttttgcgtgatgatgaggccgatttagtgtctcttgtacgtcgaggcttaagtgagactgaactcgccagtcatattgaatgggctctacaacgtaaacaagaacgtcatgatggtgttacgatggatcaaccagaacgccctatgtggcgcatcggaggatagtatgggattctttgattttctgaaaccgagaaataaagagtttgtcgaatcctgttggcctggtggtaaaatgctgcaagtccacatggaatatgatacacaaaagcttatatttacctatataggacgttatggattacaatttagcgtgcctaaggctgatgtaacagacatcattgtgaaagaagtaagtcgtacccatagcgttattcaaatttaccatggcgaggaatgtgtggggactacggatatcattcctaccgaggcttgtgaaacgataaagaattggatgttagaattctaatatcctatacctatagagatggtataaatcaaattgatatattttatgggaatgtaataaatattctttacattcctataaaataagcatataataattcatgtcatggaccactagctcagctggcagagcacctgactcttaatcagggtgtccagggttcgaacccctggtggtccaccaaaataaacccgcactacggtgcgggtttttcttattattttgacattattttatcaggttaacttttgacaccattttgacatcgattaaaagttgattattagggggatttaaatgaaactagaagatgtaatgaccacacaagaggcgggagagagatggaatgtaccggctgattcaataaaacaatgttgtttaaagcgatatgcaaataatcagttcactgaagatgaagctagaaagtccggaagaaattggcttgtaacccgtcaaggtatggaacgcttatatggtaaagaaataaagcctttataaatttattccgataaatatcacatagacaataagttattaatcacttatgattggaatatagtagtatttctcattaggaggtcccaaatggcagtagatgtatccagaacacaagatgtatataaagatgctggccaaagtgtcaatttcacaacattattattaaatcgtaaagatcgcgatgcagaattagaagtaattcaagacatggcagatcgtattcaagccattaaacgttctgttagtattcgtgctaatggtgaaggcttgggtattgcgtttggctttagccgtaaagcatgggactatttattccctaatgcacctgtaccaaaagagttagaagactttcaaggtattaaaggggacaaacaagatgtgccagctgtagcggctgacttgttcttgcatgtacgttccaatgatgaatctgttacatatacagtagtggaccaaatcatggaattcttacgtcctgttacatccgtagttgatgaaactcatggattccattatgaacaaggccgtgctatcatcgatttcgttgatggtacggaaaatcctgtaggccaagaagcggtagaatggggcgttatcggtgatgaagaccctgaattcacgaatggttcttatgcttttgcacaaaaatatgaacacgatcttgatgcgtggcgtgcacttcctacagaaatgcaagaaaaattcattggccgtcgtaaattcagcgatattgaattggaagacgatgaaaaagatccagcagctcacaatgtagtagctcaagataatcgtgacgatgaagaacataaaatcgttcgtatgaatgtaccatttgcacaacctggtcaaggtgtgcgtggcacatatttcatcggctatgctcgttattgggatgtaacgaaaacaatgcttacaaacatgtttactcaaaacgataaattgctagattattctaaacctattaccggtatgctattctttattccatcccttgatacattggatgctattgcagaaggcgaattataatcgttataattttacgatatatgcaatgataaaataatatgcaataaaatctatagaaagcgcccctttgggggcgcttttatgctataattaaagaatattattgattctgtagaattttagtttgtagaggttgcccatgaattatacaagtacacgtggcactgttgccgtaaatgaaacatatgcattattacatggtttggcggaagatggcggtttatacgtaccggctttatttccaacgaattgcttgagctataacgacatcaaagataaatcttaccaagaggtagctgctgttgtattagcaaaattattcccttgcttctccgaagcacatctcaaggaaatgattaactccgcttacagcgatgcaaactttagcactcgtgatattgcacctctacattctttgcttgaaaaactatctgtgttagaactgttccacggccgtacacaagcatttaaagatatggcgctttcactatttccatatttattggtagcagcgaaagaagcagaaggcgaagataaagaggttcttatcttgacggctacatctggtgatacaggtaaggctgcccttgaagggtttaaagatgtacctggtacacatattcaagtattctatccaactgatggcgttagccctatgcaagcggaacaaatgcaaaagcaagaaggcgctaatgttaatgtaactgctattcatggtaactttgatgacgctcaacaatttttgaaacgcttatttgtcgatgctgatacagcaaaagaagtagccgaaaaaggcgttatgttctccagtgcgaactccatcaatatcggtcgtttagcaccgcaagtagtatactatgtaaatgcttatgctgagcttgttgcacaaggtgctatccatgaagatgaggcgtttaacgtagtggttccaacaggtaattttggtaacatcttggctgcttactatgctaaaaagatgggtattcctatcggtaaattgatctgtgcatccaatcaaaataacgtgcttactgatttctttaacactggtacatatgatatgaatcgtccattctatacgacgatttctccatctatggatatccttgagtcctctaattttgaacgtttcttgtactatatctccggcgaggatagtgaaagaacagctcaatggatgaaagatttgaaatccacaggtaaattatctgttaatgaagaagaatttaaacgtgtacaagctaatttcagcggtgcctatgtcaatgacgaagaaacaaaggctattattgagcaagtgtataactcctatggctatttaatggatcctcatacagctgttgcgatgggtgcgtatatgaaagaattagaagctcatccagaagatggtgctcgtcatacaatcatcgcatctactgcacatccattcaaattcccaacacctatttgtgaggcccttgatattaaagttggttctacgccttatgaaagcttggataacatctcagctgtaaccggtgtagcattccctaaacaattggctgcgttaaaggctaaatcattacgctttacaaaagccatcgacaaagaaaatatgaaacaagaaattctagattttgtcgatacattctctaaataatactatgccgcctctccttggaggggcggtttcttattgtaatggttatcgatatattgtattgatgagatagggggatatatggcaaaaaaaggtttaatttatgcactcctttcggcactattgctgagtaccatgaatttatttgttaagatgctgggatccaatattccatctggagagattgctttctttcgcggcttatttggcaccgttgctgtccttgtcgttatgtatatgaagggcatccgattttccacggaggaccgaggactgcttattatgcgaggcctctatggcggttttggcatggtgtgtaactttatagccttggtacatatgaagatgtctgatgctaccatattatttcaaacatcgggaattttcgtgtttatctttagcgcctttttccttaaggaacgcgttccgaagggcgctggtaaatggcttatcttaatcttcatagctgtaatggttatggttaatccatttagttatggcggatttacctggtatgccttagttgccatcttaggtgcagcgttatctgccgctgcgtatacaacaattcgctccattagtaagcatggacaacatagtaattttgagatcatggcttatttcttaattacaggaatgattgcgggccttgtgacgacagatggatttgtcatgcctcaaggtcaagaatggctaatcattactgctattggcggtataaccgtagtggcgcaattcttcttaacgggcgcttttgttacaacgaatgctgtagtagcacaattcttgcaatatgtaggcgtattcattagttccttctatggatttttattctttggtgaaagtctatccatcgaaacggtgggggctggtattgccatgtttgtggcgtccgttatgttggcgcgattaaaagagcaagatggacctattcgggcaggcaaaattatagaggaaaaaacaaaataaatgtcgaatactatataagtagtattggtgcataattaagatgcgaccatcaattaggaatattattgtatggttgcatctttttgtatattgtaggagtgtgatgactatgtttatggagtggattaaaattgagaattatcgtaatctcgtagatattgaactacactttcacaatgatatcaattactttgtaggcgaaaatgcagtggggaaatccaattttcttgacctcttagagcaaatgatgaatgtacgaggctttcaagaaagtgattttgctgatgtgcataaaccgatacgcattgagtgtaaactgtctttttctgaactgactacctcatttcaggatatacttggtccagaagatggcatgtatctacgacttgaacaagtggtacaagaggtatatccacgactctataaggtggagggggaccaattgacacctgtaccattgtctatgttgcgccatacaatctatatgtgtcatcgcgatacatcggaggcggaactttattccattcctacatcggtgtataaggaacttgggaaacagcttgttacctatctgcctaagactggattgacatcagatgatgccatcgcattagatagctttatcaatgtaagaatggggcttgatcccgaatgtgttcttaatattcagcgtcttgtagaactattaacatcctctacagaggcaaacttaattcgtaagtattccatagataatgtacgccttatcatggcggtagcgctaaagattttggctcaaatttacatgaaggtgcacagtgcatcctccaatttagaatcattgctcgtgtatgacagtgaaggccgtcgatatttacctgtctttatcagcgtagatgagccggaattgcatttgagtccttatttgcaacgagccgtattaaactattatcgtcaaattgcgaccaatgaaaatgctgaatttttagcattaattaaacagttatttcaaattgatggcctattaggtcaattatttgtggtaactcatagtacagatgcattggtagatgattatcgtcatattatacgcatgtatcgtgatgagatggggctcgttcgcgccgcttgcggggtgacatttaaatttgctcgagaagtagaaaagcatttgattatgcattttcctgaagcaaaggaagccctctatgcacggtgtatcatcttggtggaaggggaaactgagtatggtagttttgcaggtatggccaaaaaattaaatgtagattttgattattttggtatatgtcttattaatgcacgtggagaatcttctattagtaagcttcataaattatttaaaagctttgccattccgacggtagcactctatgaccgagatgtaatggataagcatagcaagtctcatgttaatgtcttttatacaaatgaaatctgttttgaaatggatgtagtatcccatttgattcgacatcatcatcgggatatattggatgccattattcaagatcttattgatactgggcgtggtatggtaacaaaggatatggcccgtcgcggttttgctaagttagggcttgatgatcatcaagtggtacaacgatgtttgaaaaatatcaaggcaaaggatatagatacattattggcgtactatttctcttggttttatagcaataaaggtgtgattgtagggcgtagaattgcctactatataccggatcatatgattccaccagcctttattgcggttattgaacgggctaaagttttatctctagaatcatctattatgaaaataggatgataagcatattaaaaactttcaataaactatatcgaaaaatgttgacatagatgcagttttcttttatgattaatgaggttaatttttccgaacggtattaagtgtgagtaggagttaaacatgaaggaatttattaaagagtttaaagagttcgcttttaaagggaacatgatggagctcgctgtaggtatgattattggtgcagctttcacagcattagtgaattctgtagttagcaatttgttcatgccattaatcagtgtgttcactggtggtattgattttagcaatctatatttgccattaagtgaagcgtctaaagaggcatttgtaaatggtgctgatattgcaacagctcgctctgctggtgctgtattgccttacggtacattcattactgacctcattcaattcttaatcttagcattcgttgtattcttaatgattcgcgcgttgacgaagctaatgcaaagtgctaagaaagaagctgaagaagcaccagcaactacaaaagaatgtccattctgtaaaacagaaatcaatattgatgcagttaaatgtcctaactgtacatctgatttaaaataatcaacacactaagaaagagttctagaagcataatgcttttagaactcttttttgttgtaacttagccctgagttttggtaaatttccaattataggatacaatatagatacatatagttttcgttgtaaatgatatgttgttacagcatttaagaatatatagagaagggatgaaatgattatggaacgtaaaccattagtagtggtacctggcttagtgcgacgtgatgctattgcctatttacaagaacatgttgacgtacgtcagtggacagaaaaaactaaaatgcctagagaggttttaaaagaatggttacgcgatgctgatggtttgtggtctattaattccatatcggttgatgcggaccttgtgaaagatgcgcctaatttaaaggtcattgcacaagcctcagtaggctatgacaatgtaaagattgatgaacttacggcggcgggcattccttatggcaatacgccaggtgttctcaacgaaaccgtagcagaactcgctttcacattgattgctacggcgagtcggcgcattattgaaaatgcagcctttgtaaaaaatggccgttgggctgagcgtccttctaatattaagggctttgacttgagtcgtcgcacattgggtatcattggtatgggtgctattggcgtttccatttctcgacgtgctcgcgcctttggtatgaccgttgtatatcataatcgacatcaacgtaatgatgacaaattgtatagaacaacatatatggaattagatgagctactcgctacgagtgatgtagtatgtatcatggctccacttacggatgaaacgtatcatatgtgcgatgccgagttctttaagaaaatgaaaaagaccgcattgttcgtcaatgtaggtcgcggtgccatcgttgatacagatgcactcatcgatgcccttaaaactggtgaaatcgattatgctgcacttgatgtaactgatccagaaccattaccagcagatcatccattattgtccattgataactgtttaattgttcctcatattggttcgtatacagatcggacgcgatatgatatgtccatgttgacagcgaataatatcattgctggtgttcataaaaaacctctacaaacatgtgttaatgaagaggtgaattataaaatgtgcggtcctatataaaatatggtaaaataaaagaatatttatcgtatggaggttgtaacgttggaacataaagatactgaacaaactgtagctcctgaagaagttgtatccattaactttatcgaagctgaaataaataaagataatgaagagggcgtatacggtggccgtgtacatacgcgattcccaccagaaccaaatgggtatttacatatcggtcatgctaagtccatttgccttaactttggcttaggcgaagaatacaagggcttaacaaatttacgctttgatgacacaaatccagaaaaggaagatgtggaatatgtaaattccattaaggaagacgtggaatggcttggattccattgggatggcgacgtacgttatgcatctgattactttggcaaaatgtatgattatgctaaaaagcttatctccttgggtaaggcttatgtagatgatcaaacagcagaagaaatccgtcaaacgcgtggcgatttctctacacctggtacgaatagcccatatcgcgatcgctctgtagaagaaaatttaaaactctttgaagaaatgaaagaggggaaatacaaggatggcgaaaaggtattacgcgctaaaattgatatggcggatcctaatatcgtcatgcgcgatcctgtattgtatcgtattgtaaatgcagcgcatcaccgtacaggatctgaatggagcatttatccaatgtacgactttgcacatcctattgaggatgctattgaacgcattacccattccgtatgtacattggaatttgaagtgcatcgtccattgtataattgggttctcgaagattgggaagacactgaaaaacctcgccaaatcgagttcgctcgtttaaatgtaacaaaaatggttatgtctaaacgcaaattacgtgctcttgtagaggctggcctcgtatccggttgggatgatcctcgtatgcctaccatttctggcttacgccgtcgtggctatacaccagaagccatccgcgatttctgcgaccgcattggtgtcgctaaggcggatagcaccgtagatattgcattgctcgaattctgtattcgtgaagatttgaaattaaaagctccacgtccaatggttgtcatcgaccctgttaaggttattatcgataattatccagaaggtcaaacagaaccttgtgtggttgaaaataatccagaaaatgaagaactcggtactcgtgaagttatgtttggtcgcgaaatttatattgagcgcgctgactttatggaagaaccggttaagaaattcttccgcttggctccgggaaaagaagtacgcttaaaaggcgcttatttcattacttgccaatctgttgtaaaggatgaaaacggtaccattaccgaaatccattgtacctatgaccctgaaacgaagagcggcagtggttgcacacgtaaggtaaagggtacattgcattgggttgaggcttctacggctgtagatattgaaactcgtttatatgactatttgcttaaagaagaatccgatggtaaagacttcttagctgattttaatcatgaatcgttacaagttatgcacagtaaaggtgaagcaagccttgctaatactgttcctggcgatagattccaattcttgcgtcaaggttatttcgtaactgataaggatagcactgccgatcatattgtggtaaaccgcatcgtaggtttacgtgatacatgggcaaaacaacaaaagaaatagttgtgattataccgcccctttaaggggcggttttgtttaggagaaaactatgaaatcaatgatagctttagctctcgctggtgttgtagcgatgagcacacctgtacttgttgatgcggctaatattaatgctagtaaatatgccgctgcatatggaacgtataatggtatgaaacttaacgaaggtgttacgatttatgccaatgcgccaaaggcgttgttcgccggcgcaggtaaaaccgatgtaaaaacggctcttatgcaagctggtgccagtcgtgccgaggtatatacgcttaacgtaaaacgagaaaatgaaatgaattacgctgtatttgcgaatgtggtcgtaggtggtaaacataatcttgttaacaccaagcatgtgagcactgatgccagtgatgtcggtaatttggtggcgtctatcaatggaggtaaagctgctgagctaggccaataccaagtggtgacacctttggctaagcataataaaacgtatgtaggtgcactaaaatatacaagtaaagataataataattcttataatgagattcttcatgttgctgtttctgaaagtaaatacgagggccctagtgtgcgatttatcgctatagatgaagaaagtgatgctaaggtatttcctcgtgtgagcaacttgctaacgggtaaataataaataattattgaaataaattatcaattatcttgacaatatttctcatcgagagtactatgtgtatatagtaatcaatctcaagtaatgaggcggattctatatagatatgcaacaggcaggtacgactatgatggattcaattgacaatatcattggatttcattgtgcaccggcaattcgaggcattaaggtctcgaatttggtttctattccacgggacatgaatgaacaaatccaattcgttttgactgaatataataaagagtttaatgaaaagggtttattcttctttgaattatgtcgctgtaaagcacgtagactattattggtgttccgtgaaacacaattacgagactatgtacggcaacctgcggtgatgacatttttgaaagcctacggttatcaagatagtatgagcattatggagatgcttgaacatttgcgatatcgtatggaatcaagcgttgatttccctcatgaaattggtgtgttccttggatatccattaatggatgtgaagtattttatttctcgtcgcggtaatggatactctatgtgtggtgaatggaaggtttaccacgatgtagtagatgcacaacgctctttcctatgttacaaagcatgtcgtgaattttgtcaaactcaattgatgttgggaaaaacatttagttcattggtcgcaagaacggcctaggaggtacaagatgattggtgtaattttttggtccggtacaggcaatacagaaagaatggcttatgaagtagctgaaggtatcaaagctgcaggtcaagacgtagaagtaaaatccgtttctgaagtatctgttgatgaagcagcagcttacgataaattggctcttggttgcgctgacatgggtgctgaacaattagaagaaggcgaattcgaaccattctacactgaattagaaggtaaattgagtggtaaaaaagtagcaatctttggctcctatggttggggtggcacttggttagaagactggggcactcgcattaaagatgctggcggcgaattagtagctgacggtgtggcaatcttgggtgaaccagatgatgacggcaacgcacaatgccaagaattgggtaaaactttagctaacgcataacaacttcatattatataaagactatagcgatggatgtgacatcgctatagtcttttttgtatctatttatggaaaggtgtactgctttggtatataattaaataatgttattgcaaaggagacgcattatgaaggacgagcgatttatagttacctaccgaattgaagccgacacatatgaagacgcaaagtctattgcttgggctgttcaagtagaacaaacgattgaatttccttatgaatttgtaactgatccatatattaaaaatacaattaccggtcgattggaatctctcgaatcgatggcgccagattccgcatatgcaactgtgggagtgatgccgaatgcagtgattgatgcttctcggtattatctagctcgcatttcatatcatgtagatactaccgcattagaagcaacgcaatttttaaatgttgtatttggtaactcatcgttacaacctcatatttgggtggtagacatagaactatgtcctacattatttgacgtattcaaagggccactatttggattgcatggtattcgtagattggttgaaacgccaacaagaccgatgattcaggctgtaattaaacctatgggaacgcctaatgaagaactagctcgcatgtgtgcagcgtatacgcgtggtggtgtcgatgttatcaaggatgatcatggcattacgaaccaatctttttcgcagtttaaggatcgtgtaagacgatgtgctgctgctgtgcgtgagatgaatgaagcgcatggaaaacacgcattatatgcagctaatgtgtctggtgacggtacagacgtattagaacgtgcttattttgctaaagaggcgggtgctacggcccttatggtagccacaggtttagtgggctctggttggttacacaaattggctaccgatgaaaaattgcgcttgccgattattcaccaccctgcctattctggtggttttgtgagtcctggtgtatccggcattgccgactatttacagttgggattcttgcctcgcctatttggcgcggatatgatggtttttgtatcctatggagggcgctttacctttacccaagagcaatgtaagcgtattgccgcgtatattaaacatcctgtaggattggtgaaagcaggctgtccggctcctggtggtggcgtgactgatgcgcgccttacagaattagtcgagttgtacggaaatgatacgatgttcctcgttggaggcgatatgttccgtcgtggaccagatcttgagtcgaatatggcgtattttgttaatcgattagaagaactgtcacaattgaaacaataatagttgtgaaagttggactttcactaacgcaatcgtacggtgattgaaagactttcatcaatagaaataattaattatatggagtagtttaatgagtgaaacctcacctttagaggtccatgttcttgccagtggtagcaagggtaattgtacagttataaaaaaaggaaattctgtaatattacatgatgtgggtattagttgccggcgcatcgttaatgggctgaaagaattacatatcgatatgagtcaggttgagggaatatttattagccacgagcataccgaccatattgcggggctacaacaactattaaagcgttttgatattcctgtatatactaagcaaggcacgtggcgtgaaatccaagataagttaatcgttccaaaacaccaactggtggaattgacaaaggggagtttggagcttggaaatcttacggtggaaccctttagtgttagtcatgatgcggcagatcctataggtatcaatgtatattctggcaaggataaggctacggttgtcaccgatacaggtgtgattacggacgatatattgaaccgattagatggcagcacattgctagtcttggaggctaactatgatcctcagatgttgcgttttggaccgtatcaaccgtttttaaagcaacgcgtagccagtgatgaaggccatttgagcaatgaaatggcggcacaggccttactcatgatgaaacgacctgattttatgcaggtcattttggcacatcgctctgaaaataataataaccctgtcctcgtaacgcagacgattggtcaaatgctcgtcgatgggggcgttaaaataggaccggaaatgaaattacagcatggccaacctaacgaaatagtatccatgcagtctgttcataaaaattagaggtacatcttgtatgaagtttcatgtaatctgtattggtaaattaaaagaggcttaccttcgtgaaggtgtggccgaatttgtaaaacgtatgcgcccctatggaggcgttacaattactgaattgaatgaaagtaaaataggggataagcccagtgatgcggaccgtaaacaagtagtcgtagaagagggacagcggttgttaaaggccgtccctaaatcggcatacaccgtattgctagatgtatatggtaaaacgatatcttctgaaaatttggcctctatggtatctaaattagaggtggacggcatcagtgatatggcctttatcataggcggtgcctttggcgttagtgatgaattgcgccgttctgtaaaatttaagttatcctttagccctatgacctttactcatcaaatggttcgattgttgttagtagaacagatttaccgcagtgctaagataaatcgcaatgaaccataccactggtgatatacttaactaaatattatttatatacaatttatgaaaaaggagttttcaactctaaggtcgaatagtataataaagagtaaagttatatgaaggaggaattccctatgaaaatccaagacgtaatgaataaatatcctgttacagttggtaaagatgctcctatttctgatgtagcagacttattagttaaatataatttaacagctgtctctgttgtggatgaagaaaataaattgttaggtattatttcagaaggtgacttgttatacaaaaaggttcgccctcatgtacctcattatgtaaatgttttgggcgctagtatctattacaatggtattggtgaatataatgcacagttcaaaaaattgttagcatcccacgtatatgaattgatgactagcgatgttattactacaacaccagataaagatgtagaagaaatcgtatccgttatgcttgatcaacatttgaaaaacgtccctgttgtagataaagagtaccgtttgattggcattttatctcgtcgtgatatcattaaattgattgcaaaagataactaattatttacatatatgcaatactaaacagccactccctatgagtggctgtttccttataatgctaagaattgcattgcattttcatttatgatattataaggagtgcataatatactacagaaatttgggcgtttgcccttcaaggaggacatattttaatgaaagcaactgtaaatcctgttgatcaacacgtagtaactttaactatcgaagtacctgcagcagaagtagacaaaggtatcaaacaagcggtaaaacgcattgcaaaccaagtaaacattcctggcttccgtaaaggccacgcacctcgtcgtgtattggaaatgaactttggtaaagaagctatcttggaagaagcatttgacgtattggctagccaaaactatagtgctgctcttcgtgaaaacgatatcgttcctgtatctgatccagaaacagaacgcgtacaattcgaagaaggtaaagatttaatcttcaaagtaactgtaacaaaacgcccagaagttaaacttggcgattacaaaggcttagaagctacaaaacaagacgctactgtaactgatgaacaaatcgaagaacaattgaacaatattcgtgaacaacaagctaaaatggttgttgctgaagaaggcgctacaattcaaaaagacgacttcgcagtaatcgatttcgctggttctgttgacggtaaaccatttgatggtggcgaaggtaaatcctacccattacaaattggttccggtagcttcatcccaggtttcgaagatcaattgatcggcgcaaaagctggtgatgatgtaactgtaaaagtaacattcccagaagactacttcgtagctgaattagctggtaaagaagcagaattcaaaactcatatccatgatattaaacgtaaagaattgcctgaattgaacgatgaattcgcaaaagaagcaagctcttacgaaacaattgaagaattgaaaaacgatcttcgcgctaaaatggaagaagaagcatcccgtcgtgccatcgacacttacaatgctgatttgatccaagcagctgttaaaaatgcaactgtagatattccagaagtgatgatcaatgatcgcgtagaacaaatgattcaagaattggctatgaacatggaaggccgtggcttgaaacttgatgactacttgaaattctccaataaaactatcgaagatttacgcactgaatacaaagattccgcagctgaaaatgtacgcgctgatttagtattggacgatattgcaactgctgaaggtatcgaagtaactccagatgatatgaatcgcgaaatcttcattatggctcaaaactttggagcagatcctaaagaagtttgggatattattgcaaaagaaggtcgtgtagctatgttagcaggctctgtagctcgcaaaaaagcagctcgattcatcatcgataatgcaaaaggtgcagaagcagcagaataatgcttgctcactaggtacatgaaaaggtgattatatgtatgtaccaatcgtagttgaacaaggcgaacgtggtgaacgttcgtatgatatttactctcgcttattaaaggatcgcattatctttttaggtggacctattgatgataatgttgcaaatgcggtgattgcccaaatgcttttcctagaagcagaggatccagataaagatattcatctatatattaatagcccaggtggtgttgtaactgctggtatggctatctatgacacgatgcaatatattaaaccagatgtgtctaccatttgcgtaggctctgctgcaagtatgggggctgtattattgacagccggtgcaaagggaaaacgctttgcattgcctcatgcgcgcgttatgattcaccaaccattgggtggtgtacaaggtcaagcatctgaaatcgaaatccatgcccgtgaaattcttcgtatgcgtgaagagttaaatggtatcctagcagctcgcagtggccaagatattgaagtggtagcacgtgatactgatcgtgataacttcatgagtgcccaagatgccgttgaatacggtttgattgacgaggtgttaactcgcgatactctagaaagcaagtaatggaggcgctcattggcaaaagataaagatactatgcgttgtagcttttgcggacgcacaagtgatgaagtaagaaaactagtggccggtcctaatgtgtacatctgtgatgaatgcgtagaagtttgtgaacgcatcattgaagatgaacttggtgacatcggtacagaagactttaaactaaaagaattgccaacgccaaaagaaattaaagctcatcttgatcaatatgtcattggtcaagatgatgctaaagtttcccttgcggtggcagtatataatcactacaaacgtctacaaacagataatatggtagatgatgtagaactacaaaagtccaatgttctatttattggacctacaggtagtggtaaaacattattggctcaaacattggcaaaaatgttagaggttccatttgcaattgcagatgcaacaagcttaaccgaggctggctatgtaggggaagatgtagaaaatattctattaaaactcattcaagccgccgattatgatattgaacgggctgaacgcggtattatttacatcgatgaaatcgataagattgcccgtaagtctgaaaatccttccattacacgtgacgtgtccggggaaggtgtgcaacaagcacttttaaaaatcttagaaggtaccgttgcttccgtgccacctcaaggtggtcgtaagcatcctaatcaagaaatgttacaaatcgatactactaatattctctttatttgtggtggcgcatttgatggcatggataaggttattacaaaacgtaccgctaagaaaacattaggttttggtgctgatgtacaacgtgctgaagaacgcgatgtatctgcgattctcaaagaggttgtacctgaagatttattgaaatttggtttgattcctgaatttattggtcgtttgcctgttatggtaacattagacctattagatcgggatgcattggtccaaattcttacaaaaccgagaaatgcattgactaagcaatatgaaaaaattctatcccttgatggtgtagaattaacatttgaagatgatgcattagaagaaatcgctgatgaagcattacagcgtaaaactggtgctcgtggtttgcgtgccattattgagaaggtaatgaagtatgttatgtatgaagttccatctatggatgatgtggcaaaatgcatagttaccagagaagccgtaaagggcacaggtgaacctatactcaaaaatgaggcagacaaagacatccagctgaaatcgtaattcgaagaaactcatttctgtgtaggaatgagtttcttttcataatataaatccttggaggacatatgaatttactcgaagtaggtattcctaccgttccccttagagggatggttgtatatccgaatatcgtgattcacctcgatatcggtcgagacaaatccatcaaagcggtagaagccgcaatgaacgaagatcgcattatggcagtagtatcccaaaaggatgattctgtagatgcacctaccgttcatgatttagcccaaatgggtacacttgtaaaaattaaacaaatgttgcgcttaccaggtggtattgttcgtgttctcgttgaaggtattactcgtattcgtgttatgaacattacgagcatggatccttattatgtaggggactatgaacgtgtagcatccattttcgaagatgatgtagaacttgaggcgtatcgtcgtttagtacagtctaaattcaatgaatgggctgatgaagctaaaacaatcactgaagaaggcgttacacgcgttatggaattgcgtgacccttgtgaactagccgatcaagtagcatttatgctgcctgttaataatgcaaaacgacaagagttactagaagaattatctgttgcaagacgattgaacatgattgtaggcattcttaatatggaattacaaatttctgatttggaaaattccatcaacaatcaagttcgtcaagctatggaaaaaacacaaaaagaatatttcttgcgtgaaaaaattcgcgtcattcatgatgaattaggtgataagggcgatcctgaggaagaagcagatgaattaagagaacaattaaaagctcttaatttgagcgaagaggttcacaatcgtatcgataaagaaatttctcgctatagccgcatgccacaaatgatgcctgaagcgaccattctcagaaattatcttgactgggtattgagcttaccatggaacgatgttaccgatgatcgtctagatatcaatgaagcaaaagatattttagaggctgatcattatggcttagaaaaggttaagaaacgtatcttagaattcttggcagttcgcaaattgacaggtatgaatagcggttccatcctttgcttagtaggacctcctggtgttggtaaaacatcgttagcttcatccattgctaaagcgatgaatcgtaaattcgtacgcgcatccttaggtggtgttcgcgatgaagctgaaattcgtggccatcgtcgtacatacattggcgcattgccaggtcgtatgattcagggcattaaaaatgcaggtacacgtaatcctgtattcttgcttgatgaaatcgataaattggcatccgattataaaggtgatccatcttctgcattattagaagtgttggatccggaacaaaatagtacatttagcgatcattttattgaaattccatttgatttctccgatgtattctggattactacggcgaatgtggcctctaatattccaggcccattattagaccgtatggaaattattgagctttcaagctacatggaagatgaaaaattagaaatcgctaagcgctatttagcacctaaacaaatcgaaaagaacggtttaaaagataataaaattaaattatctgatgcagtgttaaagaaaattgtatccgaatatactcgtgaagctggcgttcgtaccttggaaaaaactatcgctaaagtatgccgaaaaatggcttaccaagtagtagaacaagatattgaaactccgaaggtttccgtcaagaatttacacgaatacttaggcgcacctatctttatcgatcaagaacgtgaaaagaaacctcaagtgggctatgttaacggacttgcttggacctctgtaggtggtgtagtattaccttgtgaagcgacaacaatggcagggactggcaaactagcactaaccggtagccttggtaaagtaatgcaagaatccggtcatgctgctatgagctatattcgtcataatgcaaaatccttgaaaatcgatgaagaattctataaaaagttagacattcacgttcatcttccagaaggggcaacaccaaaggatggtccttcagcagggattacgatgacattagcaatggtatctgccttgacgggacgtaaggtgcgcgctgatctcgctatgactggtgaaatcacattgcgtggccgcgtattaccaattggcggtcttaaagagaaattgttggcagcattgttatacggtgtgaaagaggttttaattccaaaaggtaatgaaaaggatattcctgaattaccagatagtgtaaaagaaggtcttatcatcacacctgttaagacaatggatgaagttttagcaaaggcacttgtataatgcaaaagaagaaaaaatccacaaaacatatggggccaaaaccacaatatacaagaaaagaaattaaggggcctcgcattatagcagcaaaatataatacatcctgtgtaaaagcagatcaatatcctgaaggggatacggtagaagtagcctttttaggacgctctaatgtgggcaaatcctcattgattaattccttatgtaattatcgtggccttgctcttgtgagtggacagccagggaaaacaaagacgataaactattttgatattgaatcaaaagaggatattagtgaaactgaagaacgtcggtatcactggttcttagttgatttgcctggatatggttttgcaaaaactaataaagataatcgcaatatgtggtcatcatttatatctgattatatattgcattctgaacgattaatgttattatgcttgcttatcgatgggcgtcatccagagatgcctatcgacaaagtggcgtttgattggctcgttgaggccggtgtgcctcttcaaatcgtggtgacaaaggtagataagctcaatgctaaagagaaatcaataaatttagcaaaagttaaagccatgtatccaactgattctccaccgattatgtatagctcattgaaacatacgggccgtgagttattgcagcaacgaattaatcaagtactagtaggggaggaagcatgagtaattcaaaccaattagagatgatggaacgcatcgctcttgatttagagggtgttgaacgtgctcttgcgtcatcctttaacacagggtctgaagattttaatacactgattagacctttatccgaggccggcggtaaacgtttgcgcgcgcaattatgcttgcttattgccaatgcgggtacatcggtagaggaagagcgtattaagattgcagaagctgtagaaatgttacacctagcgacgttgattcatgatgatgtcttagatcaagcggaaatacgtcgcggtgaagagacaattcataagcacaaaggcaataaggttgccattttaagtggtgactatttatttgctaaggcattccgtatcgtatccgaaatgccacatatggaatatttaaagatcttttctcatatcatcacctgtcttgtggaaggtgaatttatgcaaatggaagatgtgtatcgcattgaccaaggcatagatcgatatatgacaaagacgcaaaagaaaacagccgactttatggagggctgcatggaactagggggtctgttaggtggctggtctagtgatgaaattatgtacctaaaacgatatggtcatgcgttggggatggcgttccagattaccgatgatattatggattatcgcgaaacctcagacacgacagggaaacctgtggggaatgaccttcgagaaggcttgttaacctatccattgcttagtatcgttaatgaaagcaatcagaatcagttgttgcaagatattaagaaccttaatcatggcggtaatgaacaagagattatcgattatgttatcgctcagggtggtatagataatacattacgggtcgcacaacaatattgtgatgatgcgttatctgcattacaatctatacgtgattttgatggcaaagagtttttagtattagctgttcaaaacttagcagatagaaaggtataatatggaggccttcgaacctaaagatttcgaatatcccataaagaaaccttcatttgatagcgtagttcgacaaaagcgtcgggaacaagcacaaaaagcagaacaagagcaatatgctctggtaaatactgaacagaaagaggatgctccagagccgttatatacggagatggaacaaaagatgatggatgaagctgccaatttatcgttggtaggtcatctatcagagcttcgtagacgtattataattatggttgttgctattatcataggaacgggcattgcctattattatgtagacgtattattagatattttattagcccctgcaggcaagttatattacatgcgtcctacagaagccttctttacatatatgaaggtatccatcgtaggcggcataattttggcatcgcctatcatactgcatcaaatatggctctttgtgaaaccagcattgacagttcgcgagaaacatctatcaaactggattttaccagtagcctttttgttgtttgtaacaggtattttcttttcctatatcttagtgttgcctgctgcggttaagttctttatgggctttgccacggatgaattgcaaccgatgttttccattggtcaatatatggactttgtattggcctttgtactaccgttcggctttatattcgaactgccattggtcattatcattatgggatattttaatttaattacatcccaattcttaaagaagaaacgcaaaatatttattttgctttcctttattataggtgcagtaatttcacctacaccggatatgttctcacaaaccatgattgcattgccgatgatattattatatgaaactagcctctttgtgttagctaaagtgatgaaacgataagtacttactttcaggaggaacgatgaaaacctacgaaaatttaaccacctacaatcctggtgaaatcgaaagtaaatggtattcctattgggaaaaccaaggttactttcacgaagaagtagacactgacaaggaaccatttagcattgtattaccacctccaaatgtaacaggtatgttgcatatggggcatgcactagataatacattacaagatatcttgattcgttttaaacgtatgcaaggttacaatgtgttatggatgcctggtacagaccatgctggtattgctacacaaatcaaggtagaagaaatgctcgctaaagaagagggcaaatctcgctatgatttaggtcgtgaaaaattcgtagaacgcgtttggaaatggaagaaagaatatggcgataccattgttaaacaaattcgcagcttaggtgcatcctgtgactggagccgtgaacgttttacattggatgaaggatactatcatgcagtacgtgaagtatttgtaagcctttatgaaaaaggtttgatctatcgtggtgaacgcatcatcaactggtgccctcgttgtgcaacagcgttgtctgatgtagaggtggaacacgaagatgaacacggtcatttatggcatattaaatatcctgtaaaaggtgaagaaggtcgctttgttatcgttgcgacaacacgtcctgaaacaatgttcggcgacgtagcggtagcagtaaatcctgaagacgaccgttataaagatttaattggtaaaacattaattttgccatttgttgatcgtaaaattcctgttattgctgatgactatgtagatgcaagctttggtacaggttgtgtaaaaattacaccagcccatgaccctaacgactttgaaatgggtcaacgtcacaacttagaatccatcgttgttatgaacaatgatgcgacaatgaacgaaggtgctggtaaatttaacggcatgacacgcgaagaagcgcgtaaacaagtggtagctgagcttgatgaattaggattgctagaaaaaatcgaagatcatgaccatgcggttggccattgttcccgttgtaaaacaattattgaaccaatggtttctaaacaatggttcgtagatatgaaacctcttgcagagccagcattgaaggttgtaaaagatggtgaagttcaattcgttcctgaacgttttactaaaacatatgtaaattggctcgaaaacatccgcgactggacgatttctcgtcaattatggtggggccatcgtattccagcgtggtattgtgatgactgtggtgaaacgattgttagccgtgaagacattacagaatgccctcattgtcatggacatgtaacacaagatccagatgtgcttgatacatggtttagttctggtttatggccatttgctaccatgggttggcctaaagatacagcagagcttaaacaatggtatccaacaagtgtactcgtaactggttatgatattatcttcttctgggttgctcgtatgattttcatggctcttgagtttgaacatgaaattccattcaaacatgtatttattcatggtcttgtacgtgatagccaaggccgcaagatgagtaaatccttaggcaatggtattaatccattagatgtaatcggcgaatatggtgctgatgcattgcgctttacacttgtaacaggtaatacaccgggcaatgatatgcgtttctatatggaacgtgtggaagcaaaccgcaactttgcaaataaaatttggaatgcttctaaattcgttctcatgaatttgacgaattatgatgaaagtttcgttcctactgaggctgatttaacattggctgacaaatggattgttgaaaaatacaatgaaaccgtagcaagtattactgcaaatcttgataaatttgagcttggtgaagcggctagctccgtatatgatttcatttggaatacctattgcgactggtacattgaacttgcaaaacctcgtttgtatagcgatgctaatgaacgcgatcgtcgcactgtacaatatttgcttgtaacaatcttgcgtcatatgcttgaattgttgcatccatttatgccatttgttacagaacatatttggcaacacttgcctcatgaaggtgaaagcattgtgattgctaaatggccagaagcattagctttcacaaatcttacagaggctgcacgtcaaatggaaatcatgatggatgctattaaaggtattcgtaacatgcgcgccgaaatgaatgtacctttgggcaaaaaagccgaagttatcgtagcaccgactgatgcgtctattgctgaggccgttgcagagcatagcgattatttcgtaacacttgcatgggctgaaaaggtaactattctaggtgctgatgatccaaaacctgaaaatgcaaccgtaactgttgtaaatggtatgggagtatatcttctcttgaaggatcttatcgatgcagataaagaaaaagaacgtatcgaaaaagaaaaaggtcaaatgcaaaaagaaattgcacgcttagaaggtaaattgagcaatcaaggtttccttgcaaaagcaccagaagcagttgtagcaaaagaaaaagaaaaactagaagaatataaacaaaaacaacaagcgttgttagaacgtgaagaattcttaaaaaccttataggaggtttatatgacatacgaagaagccttaacgtatttagaagatacctcatcctttggcataaaaccggggttagagcgtatttgtgcattattgcaagcgttggggaatcctgaacgagattataaaatcattcatgttacgggtacaaatggtaaaggttctgtaacaacctatatttcgtatgctctatttaccagtggattacgggtggggcgatttacatcgcctcaccttgaatcttatacggagcgtatagaaattaatgatgttcaaattagcaaagacgcttttggcaatttgatcgattgtgttcgacaaggcgtagataagattattgctgatggggtagagccacctacgcaatttgaaattctaacggccgcagcattcctattctttaaagaacaaggtgtagactatgctgttgtagaagctggcttgggtggattactggattcaacgaatgttgtgacaccagtggtttccgttattactaatgttacccttgatcatcaagcgtattgtggcaatacggttgaagagattgccaagcataaggcgggcattataaaagaaggtgttcctgttgtaacggcggctcaagaaggaccattaaaggtcattgaagagacagctgaagaaaaacatgcaccattatatgtgtttaacaaaaagtttggtatcgatagccgtagtgtagtgcctggtgggcaattgattacggtcagtgctattggcgcaccgcctgctatgttatttacaacgatggctgggattcatcaatctgtcaatttggcttgtgcattacaagctgtacgcctagttatggaacatgatgatgctattagtgaagaaacaatgcgcgaaggctttgcccgtgccacttgggctggtcgttttgagattaaaaaaacgttggatcggacatttatatttgatggtgcccacaatgcagccggcgcagaatctttcggcatgacttaccgtgaattatttggagatacgccaaaaacaatggtgatggctattttgtcagataaggatgaaatgggtattattcatgaagttgtaaaaccaaaagatacagtcattgcagtggctgcaccaacaccacgtacagaggtgccagagaaattggtagaaaccgttcggcaatgtgtgaaaggggtagtggcacagacagaagattctgtgagcagtgctcttgatttagcattacaatcgacacaagatggagatatcattgttgtgtgtggatcgttatatattcttggcgaagctcgcggttggttacagaaccgtatgagccactaggtaatcgttatggaacactcattatttccaacggaaacaaagttgaagttttatattgaacgactcatttatggtgtggctattgccatgcctctacaaccgatggtaggggatgtgctcttgtggttggccgttgggcttgccattgtcgatttaatacgaagtcgtagtcttagcttgcctacgggctggttgtcttggactgttatgtttttcgtcctttggacgggcgtatcagctgccctttccgataatgcgcaatgggctttgacaagttggttttatcagattgtggccggtggcggtatttattatttagtacgtacctatattagtacgccaaaacagtggcgttattttcttcaatgtacattgggaacggcgattctcgtttgttgcattggtgcttatgaatatatttttattcctaatcatcatataaaggaatgggttgatgccatccaatttccaaaattaatgcgacgcatgtcgtcaacattgacaaatcccaatctgttgggcgcttacttgttgatgattctaagcgttagtattagctatttattggtttactgcaagggcttatccgataaaatcttatcggaggaatataagaaacaaatctacatgatgattcccatagcattaatactttttgttaccatgctattaacatattcacgtggcatatggatcagttttggtgccatgattatttactggggaatttttgtagaacgtcgtttattattatccttgttagcaatccccattattctatatttttatgatggagaaattgctactcgtctttggtctatattccaaggtcatgatacatcggctgatttacgatgggccttgtgggatagcacgatgtacattgttcgtgaaaatcctgtgtgggggattgggtggaatacattttacttagtatatccagaatataattattatattcaaggtcctaatgtattgatgtatcacgctcataatttataccttaatatgttggctgaaataggcataccaggacttatctcctttataactgtattaataggtcatgtggttacctctatacgtctaaaaggtgatgtgttccgtaaggctgcctccatcggtgtcggtgctttagcagttggtgttcttgtgagcggtttgtctgattttgaattatatagtcaccaagtaacgattacattctggttattgctaggatgggtaggtgcttttgtgaaagttcaacaaaatcagactaaaatcaatcataattaaaacgcatcgaaaaaaatcgaaattgttgtgttatgtataataagaattagaataagagtgaattgaagagaatctatatattgtatagaaattcttcgattcactcttttttaactatatatatgaaattataaaaatatatctataattcctgagagttataacgatgtgaatttaatttatcctaaaaatggaaaatccatgacttttagtcataatgacccataaatatgtgacaaaaaatacattttatgcatataagttgacaatgcgattgtaaaagcatacgatgaagttggtttaaggaacggtttagaccaagagattgatcaactgtcgtttaacaaggtgattttaaggagatggtacgatgatagacatcaaagatcgcgttaaaaatgcggccctccaaggcaaaattgtcacagcttatgaagcagctcaaatgattaaccacaatgataaagttggtatttccggctttactccatctggttatgcaaaagctgtaccattggctttggctgaacgaatggaaaaagaaccattcaaaattgatttatggacaggtgcttccgtaggtgatgaagccgacggtgcattaacacgtgcacatggtattaaccgtcgtttcccttatcaaacaaatggggatacacgcaaagctttaaatagcggcgacatcaaatacattgatatgcacttaagtacaatggcgcaaaatgtacgctatggtttctttggtgatttagatgtagctatcgtagaagtttgtcaaatcaatgaagatggctctttagtacctacaacatctgttggtaactctccaacatttgttagccaagctaaaaaagttatcgtagaagtaaacgtatctcaaccattatctttggttggtatgcatgatatctacgaaccacttgatccaccatatcgcaaaccaattccattggaacatgctggtgatcgtattggtactgatgcaattccttgtgacccagacaaaatcattgcagtagttccttgtgatgttcctgatactacaagacctttggcacctatcgatgatgatgcaaaagcaatgagtcaacaccttatcaaattctttgaacaagaaatcggtgaaggtcgtttacctgaaaacttgcttccattgcaatctggcgtaggttctgtagcaaatgcagtaatcagcggattggctcaaggcccattcaaagatttgtccatttatacagaagtaatccaagatggtatgtttgacttaatcgatgcaggtaaagtaactgtatgttccggtactgcattaagtccttctccagatgggttgaaacgtttctataataacatcgatgaatatcgtaaaaagattattcttcgtccacaagaaatttctaacaaccctggtattgctcgccgtattggtgtcattgccatgaataccgctatcgaatttgatatttttggcaatgtaaactctactcatattatgggtagcaaaatgatgaacggtattggcggatctggtgactttgcacgtagtgcatatctcactattttctgtactaattccgttgcaaaaggtggcgacatcagttctatcgttccatatgtatctcatgtggatcacccagaacatgacactatgattttctgtacagaacaaggtgttgctgactgccgtggtttgagcccagtggaaagagctcgtttgatcattgaaaaatgtgctcacccagactacaaaccaatgttaactgaatacctcgaaaaagcactcgctgcaactaagaatgcccatacaccaatgttgctcgacgaagctctttcttggcataaacgcttcacagaaactggaagcatgaaaaaataacctgtttttttaggaggatgatgaaaacatggcttacgaaaaccttaaagcccaaattgctgagtacaataaactttgtgacgaaaagtgtgtaaaaactccagaacgtcaaaacttgaaatacaaccgcgtgtatacaccagttgatattgaaggctttgattatgaacgtgatttgggtatgcctggtgaatatccatatactcgtggcgtacaacctacaatgtaccgtggtcgtttctggactatgcgtatgtatgctggtttcgcgacagctgaagaatctaacaaacgttaccgttaccttatcgaatccggtgcaactggtctttcctgtgcattcgacttacctacacaaatcggctatgactctgatgacgttatggctgaaggcgaagttggtaaagtaggtgtagcgattgactccttggcagatatggaaatcttgttcaacggcatcgaccttggcaaagtatccacttccatgacaatcaacgctccagcatccgttttgttggcaatgtatatcgcagtagctgaaaaacaaggcgtaccttccacagaattgaaaggtacaattcaaaatgatattttgaaagaatacgcagctcgtggtacttacattttccctccaaaaccatccatgcgtttgatcactaatatctttgaatattgctctcaatacgttccaaaatggaatacaatttccatttccggttaccatatccgtgaagcaggttccacagcagcacaagaaatcgcatttacaattgctgatggtatcgcatatgtagaagcagctttgaaagctggtcttgatgttgatacattcgctggtcgtctttccttcttctggaatgctcataacaatgtacttgaagaagttgctaaattccgcgcatcccgtcgtttatgggcaactatcatgaaagaacgttttggtgctaaaaaaccaaaatccatgatgcttcgtgtacatactcaaacagctggttccatgttgactgcacaacaagttgataacaacatcgttcgtgttgctcttcaaactgcagctgctgtaatgggcggtactcaatccttacatacaaactcccgtgacgaagcattggctcttcctacagaagcatctgtacaagtagctcttcgtacacaacaaatcgtggcttacgaatctggtttagcagacgtagttgacccattgggcggttcctactatgtagaagctatgactaacgctatctatgacgaagctatggcttacatcaagaaaattgatgaaatgggcggcgctgtagtagcaatcgaaaaaggctacatccaaaaagaaatccaagaatccgcttacaaatggcaaatggaagttgaatctggcttgcgcacaatcgttggcgtaaacaaattccaagttgaagaagaagctccaaaagacttgcttcgcgtagacgcttccgtaggtgtaaaccaatctaagaaaactcaagcagttcgcgctaaccgcgatcaagcagcagttgacaaagctttagctgatttgaaagctggcgcagctgacgaaaacgttaacttgatgccattaattcttgcagcagttaaaacatatgctactttgggtgaaatttgtaatgtattgcgcgaagtattcggtgaataccaagctcattccacattataatatcggctaatttcggaggtaattatcatggcagaaaaacgtattagagtaatcgtagcaaaaccaggtcttgatggtcatgaccgtggtgcaaaagttgtagcacgcgcacttcgcgatgctggtttcgaagtaatctacacaggtcttcgtcaaactccagaacaaatcgtagaagcagcactttctgaagacgttaatgtagttgcattatcccttctttccggcgctcacaacacattgttccctaaaattgttgaacttttgaaagaaaaaggcatgggcgatgtattagtaatcggcggtggcgttattcctgatgctgatattcctggcttgaaaaaagctggcgtagcagctgtattcacacctggtactccaactggtgatatcgtagacttcatcaaggaaaacgtaaaataattaactgggcaagagaggggctcaactggaatggttggctcccctctattcccatattctaagataggtggtgaggcgaatggatttagttaaaggcctctttgaaggctcaagactagccttagcacggtccatcactgctgtagaaaacgagtatgaaaatgccatcgatattatgaaggcaatttaccctaaaacgggtaatgcacgtattctcggtataactggtgcccctggtgctggtaaaagtactttgacagataaggttgttaaacattatctagatcaaggtaaaaaaatcggcatcgttgccatcgacccaacaagcccattctctggtggtgctatcttgggggaccgtattagaatgaatgatttgacattaaatgaaaatgtattcattcgaagcatggggacgcgtggtagtctaggtggtttatccaaaaagactgcagacgttgtaaaattaatggatgcctttggcatggacttgattatcattgaaacagtaggcgtaggtcaatctgaagtagatatcgtaaaaaatgcagatactatattggttgttcttgttcctggtctcggtgatgatatccaagctattaaagcgggtattcttgaaatcggcgatgtatttgctatcaataaagctgaccgagatggttgcgatcgtttgaatgttgaaattgaaatgatgcttgacctagattctcgtgaagtaaaatggcgcccaccaattaagcgcacaattgctagtaaagaccaaggcgtagatgaacttatcgaagccttagatgaacattttgagtatcttgaagattccggtgaattggaatctcgtcgggcagaacgtactcgcgatgaaatcatcgcaatgattaatgaacaaattggtcgttatgtagctgataaaatcattacaagcgacgaatttaatagccaagtggcagctgttaatgaacgcgaaagcgatccatacacagttgttaacggcgtaatgacaaacgtgctaaagtagacggcgactacatagcattagagatttagccttataaaggagataatcgaaatggcttttaaagtattacaagtggatcacatcggtattggtgttaatgatttagcagcaactaaagaattttacaaaaatgctttgggaattcaacatcttcctgaagatgaagtagtagaagaacaaaaagtaaaagtatccttcttcccatgcggcgatgctgaattagaattcttggaaactactactccagacggccctatcggtaaattcatcgaaaaaaatggcggtcgtgatggtatccaacacgttgctttgcgtgtagataatattgaaaatgctattgctgatcttatggcgaaaggtattcgtatgattgacgaaaaacctcgttatggtgctggcggttcctctattgcattcgttcatcctaaagctacaggtggcgtattacttgaactttgtcaacgaatgaaataaaatattattgtaacaagtttttatggaggtgctgacatgcaaacagtgcaagaaaaaattgagttgttgcacgaaaaactagcaaaagttaaagctggtggcggtgaaaaacgcgttgagaaacaacattctcaaggtaaaatgactgctcgtgaacgtttggctaaattattcgatgacaactcttttgttgaacttgatcaattcgttaaacatcgttgtgttaacttcggtcaagacaaaaaagaattaccaggcgaaggtgtagtaactggttatggtactatcgatggtcgtttggtatatgcattcgcacaagatttcactgtagaaggtggttctcttggtgaaatgcacgctgctaaaatcgttaaagtacaacgtttagcaatgaaaatgggtgctcctatcgttggtatcaatgattccggcggggctcgtattcaagaagctgtagatgctcttgctggttacggtaaaattttctttgaaaatacaaatgcatctggcgttattccacaaatttccgtaatcatgggaccatgtgcaggcggtgctgtatattctccagcattgactgacttcatctacatggttaaaaacacatctcaaatgttcatcactggtcctgcagttattaaatctgtaactggtgaagaagtaacagctgaagatcttggtggcgcaatggctcacaactctgtgtctggtgttgctcactttgcagctgaaaatgaagatgattgcatcgctcaaatccgctacttgttaggtttcttaccttctaacaacatggaagatgctccattggtagatacaggtgatgacccaactcgtgaagatgaaggcttaaacagcttgttacctgataacagcaacatgccttacgacatgaaagatgttatcgcagctactgtagataatggcgaatactatgaagtacaaccattctatgctacaaacatcattacatgcttcgcacgttttgatggtcaatctgttggtatcattgctaaccaacctaaagtaatggctggttgcttggacatcaacgcatctgataaatcttcccgttttatccgtttctgtgatgctttcaatattccaatcgttaacttcgttgacgttcctggtttcttgcctggcacaaatcaagaatggggcggtatcattcgtcatggtgctaaaatgttgtatgcttactctgaagcaacagtaccaaaaattactgttatcactcgtaaagcatacggtggttcttacctcgctatgtgttcccaagatttgggcgctgatcaagtatacgcttggcctacatccgaaatcgctgtaatgggtcctgctggtgcagctaacatcatcttcaaaaaagatgaagataaagacgctaaaacagctaagtacgtagaagaattcgcaactccttacaaagctgcagaacgtggcttcgttgatgttgtaatcgaaccaaaacaaactcgtccagctgttatcaatgcgttggctatgcttgcaagtaaacgtgaaaaccgtgctccaaagaaacatggtaatattccattataattcgattcggtaatcatatcatcgaatttgggagatacctttctttatttattttttagaaaggggaatgattatggaaggacaggcagttactaccaatccctggttaatcatggccattaatatgacagttgtatttgttgtgttgattcttttaggcgttttgatgacaatcgttcatttgattgaccctacgaaaaagaaaaaagaggcaccggcaagtgctcctgttgcagctcctgcagctactccagtggctacaccaagtgcatctgctcaaaatgaggatgaagtagtagcagctatcgtgggtgccattgtggcgatggggtactcatctgaacaaattgcatctattcgacctacagcaactagtgctaaatggcgcttggaaggtcgtttaagcggtagaaattaatatttttttaggaggcatttgtcatgagcaatgctacaaaagctaacggtaaggcaccatctcaagatgttgttgcagttatcgttggcgcattagcggcaatgggttattccgctgatcaaatcgcgcatatccgtccaatcgtaagctacaattggaaaatggaaggtcgcttacgcggtaatcgataagattaacgtttttaggtaatcgataggattatcagaactatatgtgtaaatgaaatttaagtattgtgtagatatacacattttggaggaatttaagatgaaaaaattcaacgttacagtaaatggcacagcatatgatgtagaagttaatgaagtaaaagctgcagctcctgcagcagctcctaaagcagctccagcagcagctcctaaagcagctcctgcaccagcaccagctccagctgcagcagcagctccagttccagcaggtgctgaaactgtaaaagctccaatgcctggtaaaatcctatctgtagcagtatccgctggtcaagcagttaaaaaaggcgaaactttgttgattcttgaagctatgaaaatgcaaaacgaaatcgcagctcctcatgatgctgtagttgcagaagttcgcgtagctgctaaccaaactgtatccactggcgatgatatggttgttcttggctaataccaagtgttgtcttatggcgcggctgcgccgcgtcatataacaatttaatatttgtgaaaggggaacgcatatggaggcttttgctgttgcgattcaatctgttataaatgatagcgggttcctcgcatttacaacatacaatgctattatgattcttgtaggtttgatcctattgtatttagcatttgctagagagtttgaaccattattgttgggtccgattgcgtttggttgtgtacttgctaatatccctcgtaacggcttcgaagaaggcgttatggcgcttattagtgctggtatctctcaagaaatcttcccacctctaattttccttggtgtaggtgcaatgactgactttggtccgcttattgctaaccctaaaacattgttgttaggtgctgctgcacaaatcggcgtattcgttgcgttaggtggcgctatgatgctcggctttacagctcaagaagctgcagctatcggcatcatcggtggtgcagacggtcctacatctatctacttagctactaaactagctcctcatttattaggtgctatcgcggttgccgcatattcttatatgtccttggtaccgttgattcaaccacctgtaatgaaattattcactacgcaaaaagaacgtgaaattgtaatggaacaattgcgtgaagttacacgttttgaaaaaatcgtattcccaatcgttgcaacaatcttcatttctttattgcttccttccattacatcccttttaggtatgttgatgttaggtaacttgttccgtgaatctggtgtaactgaacgtttgtccgatacatctcaaaatgcgttgatcaatactgttactatcttcttagcaactggtactggtttaacaatgagtgcggaacacttcttaagtttgcaaactctccttatcatctgcttaggtttgattgcattcatcggtggtacagctggtggcgtattatttggtaaattaatgagcttagtcgatggtggtaaaacaaatccacttattggttctgctggtgtatccgcagttcctatggcagctcgtgtatcccaagtagtaggtgctaaagctaacccagcaaacttcttgctcatgcatgccatgggtcctaacgtagctggtgtaatcggtacagcagtagcagcaggtacaatgcttgctatgttgtccagccactaatagtttaataattattcaccaaggtgtgccattttaggtacacctattggtgaataaaaaatcccctgtatcgtatgtaaacatgcagaaaaggggtatattagcaataaatgctttgtcagatcggtcattatgtgatgagcaagaatttcactaaataaccttctagtgctttcaaaatagtagaggtggtcatcttgttatcaattgaattaaaaatactgatttgtttcgtatgggcatttattgtttttttagttactgcactgattattggtgttgaacgcaaatcacaatggttccaaagaagaactaaatattcttggtttaatcgccgaggatttctaggagaagcattactttttggttatcccaaaactatagagggatatggggttacatttttaatggcttgtgctattagtatcgtaggctatgttttatacctcatataactacaatcagtgcatttctctgaagggagatgatgatgtatgggtgctgcagaacaaaccttaatcgtccttgcagtcatggctgttttattcgttacggaaattattcctttagctatcacttctttaggcggtgcaattgcccttggccttatggggattattactcctaaggttgtattctctggtttatctgatagtacagttgtgttgttcgccggcatgttcgttgttggtgctgcgttattctacacaggtttagctcaaaagattggtgaaaccgtagtttcccatgcaggcactagtgaaaatggtttgatgcttgccatcatggttgttactgcaactatgtctgcatttttatctaacactggtacaacagctgcattacttccagtagttgtaggtatctgtgctgttgcgaagattcctgcttctcgtcaattgatgcctttagcatttgctgctggtattggtggtatcattacaatggttggtacaccaccaaacattattgtaagtggtacattgactaaatttggtgaacaaccatttgggttcttcgaatttgcttggatcggtattcctttgactatcgctactattattttcatgatgttaattggtaagcatttgcttcctaaacatgaaattcaagatgctggcgacgttgaacaagaagtagctgctgaagatatttctaacgatcctaagaaacaattatattctggtcttattcttttaggcgtaatcatcgctatgattttaggtgacttcctaaaaggctatggtattaacttaccattgagcatggttgccgttattggcgcaatgctttgcgtattgactggttgcttgaacgaaaaacaagcttatacatccattgactgggttacaatcttcttatttgcaggtatgatgccagttgctactgcactagatcaatctggtgcaggtaaaatgattgctaatgcagttatcggtattatgggttctgaccctagcccttactttgcaacagcagtattgtttattttgtcttgtgttatgactcaatttatgtctaacacagcatcttgtgcattgttggctcctatcggtatctccattgctcaaggtatgcatgctgaccctcatgccgtattgatggctatcggcgttgctgcatcttgtgcattcggtacacctgtaggtacacctccaaatacattagtacttggccctggtcaatacaaatttactgattatgtaaaagccggcgttccattgattttagtttgcttcgtagtaagcttaattatcattccaatggtatggccattcttccctggtaaataatagggaataggttactctactatacaagcacacacgaggtcgaatcgtaagattcggcctcgttttttatgattttagcctatatgattttaatatagattacatataagtgtaatcaaaagcaatatgaattaaactaatttgcatgattaattttacacaattgactacatcgaaaaaaatatgatatagtatattgtgtaagatataataatgtaatgttgaatatggaggttatctatgacaaaagaaagatttaacatgttagttggttctattggtgcatttattggtgtatttgtatttttagcctatatcccacaaataattgctaatcttcatggtcaacctagtcaaccatggcaaccattatttgcagcagtatcctgtttgatctgggtattatatggttggacaaaatcacctaaacgtgattatattttaatcgtaccaaaccttgcaggcgttattttaggtacactaacattcttaacatctttctaagtgctataagaaaaaaatagtattattgttatatagtgaataatagtaaagatattactttactttataaatataaatgaggtcgaatcgtatgattcggccttttttagagtgaagtttatatgttagattgaaatatagataagcgttaaatctgttgtaataaaaaaatagtttttatgataataaatattgataattgaattcctagtatattactacgtattttgataaaaatgataattggtgcattctcaattattgaaagatatatttgaatatataaatgaaaagaaatatcaaaatcatgataaacatagactttatatgataaaaaagaacaattgttatgcaaaataatatacaaaattttatcattttcgtttgactttcaattattattgtgtgataatgagaacagaagttaaggcaagtgcctttttaaatgataataataagttttcttttataatgttcctatggaggtttatcatgagagttattgctgatggttgcattaaatgtggttcttgcgcatctgtttgcccagttgctgctatttctgaaggcgaaactaaatacgaaatcaacgatacttgcatcgactgcggttcttgcgaatccgtttgcccagtatctgtaatttccgctgagtaatcacaaataaaatacgcccctcattgaggggctttttattttgcctaaaatcatgtaacttagtataataggactattaagatatatattattaaaagggagtataacttgttttattttattgcaatcatttggcttgtattggatcaagcttctaaatattatgtgatgaaccattttgctcttggtgaatcactaccggttattcaaaatttgtttcaccttacctatattattaatcgcggtgcagcctttggcatgttgacgaatcagcggtggttctttctagccgttgcttttgtattaattatcgtatatggcttctatcgtaaacgtgttaataatggtccactttcattacgagtaggaacggcattgttgattgcgggagccataggtaatggcatagatcgatatgtactacatggggtagtagacttttttgattttagaatttggcctatttttaatattgcggatattggtatatgtgtaggcgttgtatgtgtcatatattatttactaacatctgaacatgaggagaaatagatgaacgaatataaagtatctttggaacaagagggaaaacgtcttgatgtatttctgacggatgtgatggaaggatctcgtagttatatccaaagtcttattaaatctggtcatgttttggtaaacggcaaggttggtaaggctaacttacgccttaatgcagatagcactatttctgtagatattccagaaccagaatcggtagaaattttaccagaggatattcctgttgaatatctttatgaagatcatgatattattatcgtcaacaagcctcgtggcatggttgtacatccagcaattggtaattactcaggaacgctagtgaatgctttgctttaccattgtaaggacttatctggtattaatggtgaaattcgccctggcatcgtacatcgtttagataaggatacatctggtgtcatgatggctgctaaaaatgatgcagctcatattggtttagctgaacaggtaaaagcacacagtgctaaacgaacatatttagctctcgttcaaggcaatatcgtggaggaaaaggggattattaaggctcctatcggtagacatcctaaagaccgcatgaaaatggctgtagtgtttgaaaacagtaaggaagcagtgactcattttaaagtgttagaacgttatggatatcatacattagtggaatgtgtgttagagacggggcgtactcatcaaattcgcgttcactttgctcatattggacatccagttgttaacgatcctttttatggatatcgccgcatggacttccctatagagggacaagcacttcattctcatacattggatgtggtgcatccaattacaggtgaacctatgcattttgaagcacctgtaccggaggactttcaaaattgtatcgccttcgctaaggaatatagagaacgtagataagggataagactatggaaacaaaacgtattttaatggatggagacgccattagacgtgccattagacgtattagtcatgaaatattagaacgtaataaggggctttcaaatgcagtcattgttggtattgaacgacgtggcgttatgctagctaaacgactgcaaagtgaaattgaagctattgaaggccttcatattgagtgtgaacctttaaatgtagctatgtatcgcgatgatcgggatacgcgacctaaggaaggggaaccttgctctattgatactacagaaaaaaccattatcttagtagatgatgttttgtatacaggtcgtaccattcgtgctgctttaaatgcattgatgacatctggtcgtcctaaatctattcaattagcagtattggtggaccgaggccatcgagaattgcctatacgcgctgattatgtggggaaaaatatccctacgtctcatttggaaaaggtacgcgtacaggttcaagaattagatggctctgatggggtaactatcgaacaataataggtagatataacaaatcgacatatgaaaagactcgacgtatatggtcgagtctttttggtaggggaataatatgataaggctatattgttataacctatatttcaatatattgtggagaatagcggaaatcttcgtgcccagtgcgcgccataggggatttaaaactataagcctgtagatcagtagccttcgtatcgatttccatcattcggcgaccaaaatcggaaactatggttgatgctttagcccatttttgaataagcggaatgctcggtgtattgtgctttaaccacgtgcgaccgcgctgattaaatgctaataatcgcgcgtattgaggacctagtatatgagcttcttgtaatattggcttagtgatttgtagcgcagtatatgctgccatgcgacgtagtcttgcataggtatagcgttttgtctttatcccttccagtgcgtgcgtccagtttacttgctgcatagccttgtgccaacgatgctcaatgccttccgtaaaatccccatatgtttctaattctgcagctgaaagtaagcgattgaggccatgcagaatatcatagtatctttcgtagtccacatagacatcatgtgctatgaccttgtgcatatcatctatgatagtatgtggtacataggcatcgatggttgtgccttctacaagtgccttacgtaatgcggttccagaaggaaaatcttggccttgagacagggtaggactatgatgtgatgattgtctagtaatgggaatgaccataagattagtgaaataccgttgggcagcgcgaatatattcaaggcctagtaatgagtttggcgcattgtcaatgagttctccatttggtacatacttagcaatcacttggcgtaatgccgtaccataagaaataccggtttttatatggtgttgaatggcatcttgtccttgcggcgtatttataaattcagcggctgtgtgcaatatggcattatcgtcaagctcagagccaaaggaaatgctgtgaatgtgtagcgctttcataaggcgcaccgcaccggtacaaaatagttctgcactgcctagagaatagaccgtaggtaattcgataacgacgtcggcaccaccatgaatagcccatcgagcacggtcgaatttgctaaaatacgcaggctcgccccgctgtacaaaggaaccgctcataatggcgatacgcaatgcatcaggataggtagtacgtaatgtatgtaattgatgcgcatggccgttgtgaaacggattgtattcacaaataataccgattgatttcatcgtagttcctttcataggtttattttctattattatataataaattaaagaatttatataatgggtggcatgtgtaatgtatggaatttttgaccttcttgttaggaattatagaatttcttgtgaaagtactagaatgggaggcggtgtaatggtataattatctgtgaattctgatttgacgtgaggtgatttgatgaaagtacagtggaaacgagcgttacagaccatcgtgttaggtacatccttattggctttagccggatgtggttccgataatgtgatggatatatatagctttggtaatcaagtcattcgttccggtcaatcggaagtgactgtagccttgccatatgaaatggggaaaacatcagaaacgacgagtgttgatggataccctatggatgcgtatggtagcctaagccaacatatattgatttctgtagaggctcgtcaaccggcaccgaataaagcgttgccaacggttgcacagtttgtggatcaaaagaaatctgaatatgcaaaattgggtgctactgttaatgtggaatctatcgatttaaatggagtgcaagcacagctcattactggtgatttttacgttaacaaaattaaaactagtttctctcaatatgtctttatggataagggcgtattgtggaatataacctatagatatcctacggatgatcaaataggcgctgatatcagcaaacaaattaaagataagatttacgttacgcaaaagaaagagggttaatcaatgaacgtattagtagttaactgcggtagttcttccttgaaatatcaattacttgatatgacaaacgaaactgaattggcgaaaggtttatttgaaaagattggtgatcaagacgctatcttcactcataaacgtccaaacgcagacaaattagaacgcgttgaaccaattttgaatcacaaagaagcattacgcatcttgctcgacatcttagttgatcctgaatttggtgttatcaaatctatggatgaaatcgatgcagtaggtcaccgtgtagtacatggtggtgaaaaattcgctgattccgtattgattacacctgcagtaatggaagctttggaagaatgttcatcccttgctccattgcataacccaccaaatatccaaggtatcgaagcttgccaagctatcatgccaaatgtaccacaagttgctgtattcgatactgcattccaccaaacaatgcctaaagaagcttacatgtatgcgcttccttactcctactatgaagagtacggcattcgtcgttatggtttccatggtacatcccacaaatatgtagcacaacgttgcgcagaattgatgggtaaacatatgtctgatcttcgcatcattacatgtcacttaggtaacggttcctctgtatccgctatcaaaggtggtcgttccatcgatactacaatgggcttcactccattgtctggcttgatcatgggtactcgtactggtgatatcgaccctgctatcgttccattcttgatggataaaacaggcatgtcttatgaagaagttgaccgtgttatgaataaagaatccggcgtattgggtatttccggtgtgtccaatgacttccgcgtaatcgaagaagccgcttctaatggtaacaaacgtgctcaattggctcttaacatgttccactacaaagttcgtcgtgtaatcggtgcgttcgctgctgttatgggcggtgttgatgctatcatcttcacagctggtatcggcgaaaatggtatcggtaaccgcgatgctatctgcaatggcttggaataccttggcacacgtattgaccctgaacgcaataatattcgcggtaaagaacaagaaattagtgctgaaggttctaaagtaaaaatcttcgtaatccctacaaacgaagaaatcatgatcgctcgcgatactcaacgtattacaagcgctttgaaaaaataatataacctcttaatggttatctaaactcttatatagaaacctcgcttatatcttagatataggcggggtttttgtagtttttcagagctgaatcctatataataaatagtatgcagagtcttttgaaaggggttacgtatgaatattttatatagtgaacaatctcagcgcacccgtagtgcagaattattagtagtggtatttgttattttgttggtgggggctatggtttttaccacctatagaagtattgcgcagggccatatattactttcagaatatttcatagaaattatggcgctcattgtcattgttaaacaagctgtgagccgctatacatatatattgacggattctgaatttatcatcaaagaaaaatccttttttagaaaacgtacattttctgtaaaatatgatgatattgatggcatttatgcgtataatcgcgattttctaacgaatttacgttatcgctataaatatagaaagtgttctacctccgatgatagaccgatttggttcatggtatattccattactaaagggaaaaaggttcaatatggccgtgttatgttgaaagcagaggatgcattctatgaaacactagaacagtttgtacctaatcgtgtgcgcgtgccagaagcggatgttattttctatgccacggtacgtgctgatgcggtaaaacaaggcgtcgatgttaaggaatattatgatagtctaattaaaagtgcggaagaacaggaacaagaatgagtggattatatttagcaagtcaatcaccaagacgaacggaattattgcatcaagtgggtatagaccatactgttgttactagttcttatgtagaagataatgtagtgattacagatcctattgaaatggtgaaagcacaagctcttggtaaagcgcgctgcgcaaatgatgtgcctgatggtagcatcgtactaggtgctgatacaattgttgtatttgatggaaaggtgctaggaaaaccgcatagtaaggatgaggcacgtataatgcttcgtacattatctggtcaagttcactctgttattaccggtgtagccttactcattaagggacgcgaaatcgtctttcacaatgaaacaaaggtgtattttaaaacgctgcaggattttgaaatcgagtcatatatcgactccatggaaccgatagataaggctggagcctatggcattcaaggaaagggcgctttgtgggttgataagattgaagggtcctatacaaatgttgtagggttgcctgtagaacatgtatatgaagaattatgtaaagcattaggtgtaaagtcttagattaatattgatggtcatgttaacacatcaaatagatattctaatgttatggtagaaatatgaggctgatttgtttatgtattgtaagaatggagaaattcaatgcaagtcagaactatcagcgtaaaagatatgttgccatttcaacggccacgtgaaaaatttgtcgctttaggggctaaacaaatggcgatggaagaattattggctatattattacgtaccggtttaaaaggtcaatcatcaattgatttagcacatacgattatcgattctttcacagatggcatttatgggctaaaccatatgaccgtagatgatttagtaaaaattaaaggcgttggtatcgataaagcggttactatttgtgctgctgtagagttagggcggcgtttgggtgagttaaaaatcacctctacatacgaagatttttctcagccttatgttatcgctcaatatgtaatggaacgcttgcgccatgaaacagaagaacatgtattagcggctatgttgacatctcggaataaattaattcacatcgagaccatatctaatggaggcctcacatcaagtcttgtagaacaacgggctgtttttagaaaagccattgcttgtaatgcagccgctattattttgattcacaatcatccatccggcgatagtagacctagtgatgatgacatacgtgttaccaagttatttgttagtgctggacaatttatgggcattccagtcttagaccatatcgtcattggtgatggcgagtttacaagcttgagtgaaattggtaaattaagctagttgtggtaaaatggaatgatgatgtaatgaaggagattagcattatgaattccattttaccgtcttttggaaaagacgtgagtatcgatattggtacgtctatgacacgtgtcatggggggcacgcgcgagaccatgatgagtgagccctccattgtggctactgatacaaaattagataaaattgttgctgtcggtgatgatgcagatcgcattgtacgacgtatgcctgatatgtggatggagttgacaccgctacaagatggttttatcgtcgattaccgcgtgatgcatacgatgttaaaatattttcttcacaaggtatccaatacattgcgtagatctcgtgtactcgttggcgttccttgtggcatgactgatgtagaacaacgggccatgatggatgccgtaatccaagcaggcgcgcgggaagtctttctgattgaacgccctgtggctgccgctataggttccggtttaccaatttttgaggctcgtggatctatggttattgatattggtgaaggtactgccgacatggggattatctcattaggtggcacggttattagtaagacgatacggtttggcggcagcgatttagatcgcgccatcatgcaatatattaatcagtgttttggtttaatggtatccgagcaaactataacggatattaaacatgctataggtactgcggttgtacctgcggaggattgtgaattctcctttactggtcgcgatatgacgagtggtatagttagacgtgctgtacttcatcaatctgaaatctacgaagtgattaataaacgccttgcagactttttagatgcaatccaacaaatgatacgcgttacggcccctgagttagtggctgatatcatgcagcatgggattgtgttaacaggtggtatggctcgtttgcaggggctagcagagcgaattagtaccgaaatgggcgtgcctgttcaggttgcttctgatccagaattaaaggtcgtacaaggtttgcatcgtagttcaggccaaattgtagaattagctcgttttattattaattcaaaggatagaaggggacgtgtatgatacagtcagatcgtaaattattaatctttgttgtcctcggctgtattatcatggcccttcttggttttgcctggaaacagcgaactagtatcccctttgtaaccgtaccatttgaaaaaattgttaccccattcacatatggttcagctcgtgtgctttcaacaattcaaaccggcatacgtatcattgataatgctatatcgggttttgttgaaagcaatgataaggataataccattgcagatttgcaacaaaaggtgttaaatcacgatgaagttgtggccgaaaatattcgccttcgtcagatgcttaactataaatcgtctcatccagagtttacgatgaccttggcgggcattattactaaagatttcggtacatggtcaaatacatttaccattgaccggggcgagaatgacggcatacaacctaatatggctgttgtcgtaccaagtggcgttgtgggctttgttaccgatgtatatcctaattcagcacgtgttcaaactattttggaccctcgtagtgcaattggtgttattgtacagcgtcccgaatcacgcttggccggtgtagtaaaaggggatggtaatcatcctaatgagccaatgatggtcaatatagcacgtgatggtgatgtccttgtaggcgataaattgattacctctggttatggtggaatttatccaaagggcttgttagtgggtaatgtattaacgattacaaatgatacagaaggtttcgtgaaaaacgcggctatccaaccgagcgttgattttaatcgcttagaagaggtgtttattattactgcctctacagtgcaaacaccagataaagcaaaattagaacctaaattagttcctcaaacgcagcgtgaccaagtacaaggggctaaaggagcggtaaatcaatgagatatattgcattaattctcgtgtgttgtgcgttgtattttatacaagctcaattattaccggccatatttcatacgaattggctacccaattgtatactgactgctgtagttttagtcacgatttttaaaggtcgaaaaatggggcttattgctgctgcagtgggtggatccattcacgatattttgatatctaacttttttggattacatctcttcccgtacattgtcgtagtatatctactgtctcttgtaaaaagtagtgtttacgaagaacgttggtattggtcatgcggcattatcggtgtatgtacgattttagatggaattatgcgctgcatcatgatcggtgccagtggtggtgatatccaattcatttcttacatgggacacatggttatgccaactgtattttggaatgccatattaggtggtataggccataaaatgatgggccttatggaagaaaaagaagattatatttggtagaattgctgatttagtaaagcatataaggggaatcataggtgcttgaaagtttatataaaagaaaaaaaacgagccgttttgatgtgcttttctatattgtaatgggtatcttcgttattctagggctccgtctatttgctatgcaaatattagagggtggttattatcaagctaaagcagagggtaaccgcctgcgcattgtacctatgacggctgctcgtggggttatgtatgatagaaatggtcagattttagtcggttctagaccggcctataccatttctattatgcctaatggcaaacctttagatgatgatgaattggctaagctagctacattgttacataaaaagccagaagaaattcaaaaaaaggtagatgaccacaaacatggttatgaaccgatacgtatagctaacgatatctccatggacgtggtgactagtatcgaagaacatcgtcatgaattgcctggtgtttctatcgatgtagaacctttaagatattatccatatgaaactatggcatctcagctatttgggtatgttggtgaagtaagtgaagatgaactagcagaaattaaggaacaagatcctaatacaacggttggtgctggatctatcctaggccgtgctggtttagaaaaattatatgattcagtgcttcgtggcgttgacggtggcaagcaattagaggttgatgcatctggtcgacctgtagcagaggtcgatcgcaagcatactgtaccgggttcaaatattcatcttactattgatgtgaatattcaaaaagcggcagaagaggctgttaaaaaggaattggatcagttgcgtagttcaggtgcaacgggtgcagccgtggttgcattagaccctaatactggcgcggttcttgccatggtaagtgcgccagaatttaatcctaattggtttgccaagggcattacatcgactcaatggaatcaattgaacaatgacaagagtcatccttttgaaaataaggtcattgctggtgagtatccaccaggatcaccttttaaaattgtaactggtacagctgcattagacttgaaaaaggtaactcctgatgaaatgattttcgatagtgggaaacactggctcattgataagagaaatgcagaaggcgaagcattgggttggttgaattttaatcgagctttggctaagtctgataacgtgtatttttatgaaatgggtaatcgcttaggcattgaaaacatcgatacctatgctcattactttggcttaggtgaaaaaacgggtatcaatctggttggtgaagcagccggtaatgtagcgagtccagagtataaacggaaagtatttgatcaagattggtatttaggcgaaacctttgatgcggctattgggcaatcattccatttggtaacgccattacagatggctgtacttctcagtcaagtggcgaatggaggtactcgttaccaaccatatgtggtgagtcgtgttgataatcccgatgggacaccagctgaaatttttggacctaagaacctaggcgtacttccagtacctaaaaatattatggaccttattcgcgaaggtcttcgcgatgtaactagcgaaggtggtacggctggtgaattgtttaaaggtttccctgttgctgtagcaggtaaaacagggactgcggaaaacgcacatggccgagatcatggctggtttgttgcgtatgcaccatatgataagcctcaaattgtcgtcgttgctctcgttgagcaaggtggttttggtgcaggctctgcagggccgattgtacgggatattttgagtgcctattttaaagtgcctactagtagttcaaaaacgactgacacaaaaacaactgatacaaaaacaacaaccaataaaaaagaaacacaggaaattaagccaagtgtaaaggaataggaaggatatacaatgggggatataatcggtcttatctcaggtaaaggtggcgtaggtaaaacgacgataacagcctgcttaggggctgcgcttagcgaacaaggatatcgagttcttctttgtgatggcgattttggtttgcgcgacttagatattatcttgggaaaagaagatgaggtatgttttgatgcatataatgcattagaagataaatccatggctgatgatgtagtcatgaaagttcaggataatctatattttttaccagctagtcaaagtgtgcgctgggaagatatgggacgcaaaaaatatcgaaaacttgtaagccacttagctaagtcttatgattatgtacttgtagattgtcctgcaggtatcggtcgtgggttggaatctattgtagagctagcacagcggtttctaattgttactcaacctttgtgggtatccatacgaaatgcagcacgtaccattcaattctgtcgtgaatatggccatcgtgattatgccgttgtatttaatgcagtccgtacggatcgggatatgccgaatatgtatgatatgctcgatgcactcggtgctgaatatgtgggctctatattaccttatgacacacaaatactagataatacacaggatggtgtactcattcaagatatgccaaaagcatatcgccatatgctagctcctgtagtagagtacataacctctggagatgcttgggatgaacaagaacttattgagcgcttcaacgaagtgacgactgtaaaagttactgaaccttctgtgacggccacattagctcagcctgttgagtccgatgatgataattctactaatcctgtaatatatacaaattcttggtctacgcgaaatcgacttctttctggtaaagaaagtatgtggcgtcgggttcgtataaagtaggtggcatatgttacaaagaatttggcgtgattgtgattggacaatcatcatatgtacactattacttgttgccatgggggtagttgccatcggtagtgccacccatattaatcaaacaggacttcatttttccacattagtagcgaagcaactcatcttttttcttattaacgtggcccttgtgattggtattcaatttatggattatcataagttaaaagattgggctaacggcatatatatagtaacgattatgttgttgttagccgtaatctttgtaggtacatctgccttaggtgcacagcgttggattcagttagggcctattacgctacagccatcagagttttctaaattactgatgattatctgtatggcaaagatgttagagtctcgttacaataaattagatacctttaaatctcttgttgtgcctatcttatatgtaggcatacctattttgctagtattcatgcaaccagacttgggaacgtccctcgtttatatagcgatttttgtgggcatgctctttgtttctggcatacgattgcgcttagttcgtattatcgctacggtaggcgttttactaatgccgttggcttggtttgtgttgaaagactatcaaaagcagcggattctcgtatttatgaacccggatatcgacccatttggttctggatatcatatcattcagtctaagattgctattggttcaggcactatatttggtaaaggattatttaatggtacacaaagtcagctaaactttttgcctgaaaatcacacagattttattttttctgttataggtgaagaactaggctttataggctgtatctttgtattaattcttttatttatgcttatttatcgaagcataaaggtagcatattcatgtaatgaccgcttcggtatgttattggctacagggattggatccatgttatgcttcgaggtattggtcaatgcggggatgactatggggattatgccggttacgggcataccattgccattcatcagttatggtgttagtgcgttgaccacgaatatgataagtgttggtattttattaaatatatcaatgcagcgtaaaaaatatattttttagttatgattctaatttaggaatgagtttgaaagaagtctttcacaaaagacggaggatgtatgattcaattagatacgtcatggttacaacatgtccaaaaaccagctcgttatacgggcggcgaatataacagtatagtgaaagatcacagtactgttgatataactatggcgctaggatttcccgatgtgtatgaagtggctatgagtcatttgggcatcaaaattctatatggtttagtcaatcgccgtgaagatgcagtagcagagcgtgtatttgcaccatggcacgatatggaagaggaaatgcgaaaacgcaatattcctttattctctttagaaacccgtacgcctattaaggactttgatgtacttgcgttcacactacaatatgagatgagttttaccaatattctaaatatgctagatttagcaggtataccgatgtatgcaaaggatcgggatatggattttccattgctcgtatgtggtggaccttgtgcgtataatgtggaaccaattgcggatttctttgacattgtgtccctcggtgaatctgaagaatggggcgatgagtttatcgacctattgaaagcagaaaaagcgaagggattccctggtggtaaagaagctttcttgcgaaaagcagcacaaattcccggtacctattgcccagcattatatgatgtagagtatacggaacaaggcgattttaaatcgattacaccacgctatgaagacgtgcctgctacgattcaaaaacgcatcatagaagatgtagaacatgtattcttccctacaaaaccggtggtaccgtttttggatatcgttcatgatcgggctgttcttgaattgttccgtggttgtacgcgaggttgtcgattctgtcaggccggtatgctctatcgtcctgttcgtgaacgaactcctgaacggttgttagaaattgcaaaagaaacgattgctaatacaggttacaatgaaatctctttgatgagtttaagctctgctgactactccaagttaccagaattggtagatctgctcatggaagagtttaaagataaacaggttagcgtcagcttaccttcattgcgtatcgatagtttctctatcgatattgctaaaaaggtacaacaagtgcgtaagagtggtcttacctttgcaccagaagcaggttctcaacgcatgcgcgatgttatcaataaaggtgttagtgaagaagatttgctagctgcttgcaccaatgcttttaaatccggatggaacacggtaaaactatactttatgatgggattgcctactgagactgatgaagatttagcaggtattgctaatttggcgtacaaggtgcttgatttgcatcgcgatattacgggtaagcgcaatggtagcgtaaccgttagtgtatcatttttcgtaccaaaaacacattctccatatcaatggtatggtcaacaagatgtggaagaaatccatcgtaagcaaaaatatttaaaatcgcttattaataatcgcaatatttcctatcattatcatgatggatataccggttatatggaggctgtatttgcccgtggcgatcgtagattatccaaggtattagtagaagcatggaaacttggttgtaaatttgatggctggactgagttctttagctatgaaacatggttacaggcttttgaaaactgcggtgttgatcctgcgtattatgcgcgtcgcacccgtgattttgatgagccattgccatgggatcatttggattgtactgtaagcaaggccttcttacaacgcgaatgggaacaggccgttgctgagaaattaacgccagattgtcgtcgtggaccatgtaagggttgtaatgtatgccctgaattagatacggctattgtagattataaggagggtggcagagttgaaaaaattacgtttggccttacataaaggcgaagaattacgattcttgtcgcatctcgattttgcacaagccgtggagcgcatgattcgtcgtgcagagattaagatggcctattctgagggctttaatccgcacatgaaaatcagtttttcttctgccttggcattaggtgtaacggcagaagcagaatatattgatatggatgtgttggaagatgatagcttagagtctattatggcgcgattaaatgcagtggctcctcgtggacttgaggttctcggtggtaaggtcatgcctgataaggttaaaaagatgatggccatctgcaattacgcaatttacgaagtaacaggtcctgtaacggaacagaatgttgactgggatagcttacttaagccttttaatgaggctactgaaatttcttatgaaaaggttacccctaaaaagacgcgtattattgatgtaaaagaattcgtaaaagaaccgattgtagcgtccgtgcacgatggtatggtgacactaacgatggggattggtatttatccacaaggtactataaaaccgagtgaagtatggaatcttggcaaggatcaatataattggcctattacttctggttacgaaattcaccgtaaagcgattatggtagaaaatgaagaaggtcgttttacaccattagaaattaattattaaggctatgtgtttgatttggcatatactatagttaaactgaacagaagggagggataggatgcataaaattttggtcaatgttatgcgcgaggaaattcgtatggctgtcatcgatgagaaggaacagcttatagattttgttttggaacgcactgatgagtctcacatggcgaatcatatgtacaagggtactgttaaaaatgttttgaatggaatgcaagctgctttcgttgatattggaggctctcaaaatgcttacttgaaccttcaacaaggtaaggaacagaaaatattgccacgcctatctgtggggcaacaaattctcgttcaagtggtgaaagaagaaatgcttggcaagggggcacgcgttacagcagatgtaagtttagcgggacgatttatggtgctattgccctattctgaaggcatgcatatttcaaaaaagattaccgatgaatctatccgtgctcaattacaagagttggcggcgccttatgtaaaagaaggttgtggattcattatccgtacggctgcagctaaggccagtgccgatgaaatcggtcgtgatatggactacttatggcgcacatggcaacatgtgttgaagcgatttaaggttgccaaaagtggtacagatctttacagtgatgcggatttttggtttcgccttgtgcgtgattacgcgcatcgcaatgtagaggaaattatcgtcgattctgatatgggcgaatctcgactgttggatcttttaggacacggacctacctctcaacaaatcaaagtaacacgccaccgagatagtactcctatctttaaagcgaaccacattgaacctcaattagaagatcttatctcccgcgatattaatcttccttctggtggatctattcgcattgatcatacggaggcccttaccgtatttgatgtaaactcggctcactatacagggaaatcgaataagctagaagacttagctttcacagttaataaagaggcggctaaagaaatctgtcgacaactacgcttgcgagatatcggtggtattatcgtcgtcgattttattgatatgaaggataaagagcatcaacaagagttattaaaattattgagtgctcaggctaaactagataagatgaaaaccgttgtctgtggtattagttcgctcggtttagtagagatgacgcgaaagcgtgcacgccaagggttacaaaccttgatgtttgatacatgtccacaatgtggcggtaccggatatatgttgtctggtagaactgtatatatgcagattgtacgtcggattcgggaactatttaaatctggtcgcattaaatctaatttagaaattgaggcccacccagaggtggcacaatatctaaccaaatctgtactcgatgatttaggtgcttctattggtcggagtatttcaatcgtagtgaatccacaaattagccgggaagggtattctttgatggctgtagcagaataagtaagtcgtatgttgataggtgagtatcgtgtctgtttttgaaatcattttaattagtattggtctggccatggatgcctttggcgtttctattggcaagggtttaactatgccagtaggcgaaaatggtcgaaaagtgaccttagcctttttattcgggctatttcagttccttatgcccgttataggatggcttattggtcgtcagtttatcgatgttatctctgaatgggatcattggattatctttggccttttaggatatcttggaattgctatgattcgagaaggtcttagtgatgacgatgatgaagatgatgataagcaattcttaggcgcttgggaaatgattatgctctcggtggcaacgagccttgatgcgatggctgtaggtttaacctttgcctttttaccaatcaatgtatgggaggcatcgaccatgattggtgttattacctttggtatatctttgattggtgtatatttaggtaaattcatgggccaattcgtaggaaaatatgcagacatactcggtggaggcgtcttaattcttatcggtactaagatactcttgcaacaccttggtattatcggagaattttaaacgttgtatatatatgaaagtgtcagaaactgagcgtatataagaggatttgtatttgacatagatatgtaaatacgatatactatatcagtattagttcggtttactgaactttgcaatccgcgtgaagcaggtttaaacgcccgaccgatgttcgggtcgggataccgaattcagcgagttcgataacaaggaggtgttctcatgtacgcaattattaaaactggtggtaaacaatatcgcgttgctgaaggcgatgtaattactatcgaaaaattggaagcagctgctaacgattccgtaacattcgaagaagttttgactgtagtgaatgacggcgacgttaaagttggcgctcctcttgtaaacggtgcaaaagttacaggtacagttcttgaacatggtaaaggtaaaaaagttttagtattcaaatacaaagctaaatccaactaccgtcgtcgtcaaggccatcgtcaaccgttcacaaaagttcgtattgaatctatccaagcttaattatggtttccattggaatccagcggaacaaggataaccaagtcattggttgtcatatgtccggtcatgcaggatatgatgaacatggctatgatatagtgtgtgcagcagtttctgtactgtctgctacagctatgttagggcttaccaaaattgctaagcaaaaaggtgagttttctaatagcgaaggccaatgtgatatggtcctctctggtgaaataacccggagtggtcaggatatattaaatactatgcttctcggactagaagaaattagtaaacagtatccaaagtttgtccaaatacacgaaatataggaggtgaacttcatgtttacttttgatttgcaattgttcgcacataaaaaaggtgtgtccagtactcgtaatggtcgtgatagtgaatctaaacgtcttggtgttaaatgccatgatggttccatcgtaaagagcggtaacatcatcgttcgtcaacgtggtactcacttccaccctggtactaacgtaggtatcggtaaagatgacactttattcgcacttgtgcctggtaaagtagcatttgaacgtgctggtcgttataaccgtaaagttagcgtataccctgtagaagcttaattttacaaagactatgaatccctagtggttttccactagggattttttgtattattgtttaggtggattatggtttatcgtatacagtgcattgggaaaatgattatttgttatagtaaattccaatgctttttagtaggaatagtggtatacttagtacagtatcggtgaaagattactaaaatagtaatgatatactttcacagacctaactagagtggcatgttcactggaaagatttgaggtaagtactatgtatgatgtaaaatctccaaaggcggaggaatttatttctcatcaagaaatccttgatactcttgcctatgcagaggaaaataaagaaaatcgcgaattattagaccaaattttagctaaggcggctacgtttaaggggctaaatcatagagaagcggcagttctcttggaatgtccattacctgaatacaaagaaaagctatttgcactagctaaagaaattaaaaaagctatttatggtgaccgcattgtattgtttgcgccgctatatttatctaattattgtatcaatggctgtgtatattgcccatatcactctaagaaccgcgatattaaacgaaaaaaattaacccaagaacaaattaaagaggaggttatcgctctagaagcaatggggcataagcgcattgttatcgaatctggcgaagatcctcttaacaatcctctcgattatattttggaatctattaagacgatttacagtattaaaaataaaaatggtgaaattcgtcgcgtcaatgtaaatattgcggcatgttccgttgaagattataaaaaattgcatgatgttggcattggtacctatacattgttccaagaaacgtataataaggaaaactatgaagccttgcatccaacaggaccgaagagtgattacgcgtaccatacagaagcgatggaccgcgcgatggaaggcggcatcgatgatgtaggcattggcgtattgtatggtttagaacattacaaatatgattttgtaggccttttgatgcatgccgagcatttagaagctgttcatggtgtaggccctcatacgatttctgtacctcgtatttgccctgctgatgacatcgatgtagatgatttcagcaatgctgtaccggatgatatctttgaaaaaatcgtggctcttattcgtgtatctacaccgtatacaggcatgattatgtccactcgtgaaagccaatctatgcgtgaacgtggtttggcattaggcatttcccaaatcagcggtggctctcgcactagtgtaggcggctataaagaagaggaaaaaccagaagataactccgcacaattcgatcgcagcgatacgcgtacattggatgaaattgtagattggctcttgggccttggttatgtacctagtttttgtactgcatgttatcgtgcaggacgtactggcgaccgctttatggcgcttgctaaatcaggtcaaattcataactgttgccaacctaatgcattgatgacgttgaatgaatacattatggattacggcgatgaaaagactaaaaaacatggtgccaaggttattgaagaccaattggaaaatatcaagaatgatttggtaaaagataaagcaaaggcttacattgctcaaatggaagatggaaaacgagattttcgtttctaatatctcactaaaacttctgaatatttcatgtgtaaaaaatagtatatagctatatgaacaagcactgcttattatgagaatgataataagcagtgctattttgttgagaaaaacaggtgggttgtatataaaaaataatgatgaaagcctttatttataaaggtgtttgttgtataatgaaagaaaatgataatgataatagatttataaacaatgttaatattgattataaattattacattatacatcaacattattttatgtacatatcaccgaggttttggattatgaagaagaaacgttggcatattatgccaagggatacagaaaaagagaatacattaatccgtgaactcggtgtaaatccgattgtagcgagattgatggtgaatcggaatatagatagcgatgaaggccatcgcttcttagaaggtacacttaaagatttgcttgacccctttaccttaaaggatatggaaacagcggttgcgctcatcttagaaaccatagaagcaaaaaaatctatagtcgtctatggagattatgatgtggatggtattaccgctacatcgctgttatatcgctttttagttaaaatgggggctcgtgtaagttattacataccggaacggcaaagcgaaggatatggattaaatttagaggcattagagcatattatctctgatggcgcatccttagttataaccgtggactgtggtattagctcttatgatattgtgaaggctgtttgtgatcgcatcgatatcattattacagaccatcatacggcgccacctcaaattccaccggcacgcgctgttattaatcataaacaaccagattgttcgtacacggataaaaacttatccggtgtaggcgttgcgttcaaattatgccaagcactctggttgcgtcaatgcggagagtggtatcttgatgatttagatatcgttgcacttggaaccgttgctgacgtcgttccgttggttggagaaaaccgcatcatcgttcaggctggacttaagaagatgaacgagttgcctaatttaggcatcgataaacttatcgatgtggccggcttacatgataaaacgatcaccgcaggacatattggatttaccttagcaccgcgcctaaatgcggcaggccgtgttactcatgcaacgcgtgccgttgagctacttgttacggacgatgtagatttggcagagaccattgctcaagaattacaagaaacgaatatggaacgtcaagaaatagaacgctctattcacgaagaagcccgcgctaatgtagctgctcaaggtcatttagctgattatgtaacagtagtagctggagaaaattggcatcccggtgttatcggtatcgtcgcatcgcgattggtagaagagttttacaagcctacacttgttattagcattgataatggcgtaggtaaaggctcttgtcgtagcattgaaggttttaatatttataatgcattaaaatcctgtgaagatatattgattcaatttggcggccatgccgcagcggctggatttagtatagatgctagccgtattgatgaattgcgtcagcgcttaaccgagtattgtaaggctcatgtttctcctgatgagtatattcctgttgtatccattgatgccacattgcccgttgatgatatcgatgttgatattgtagatcgtgtgtccgccttagaaccgtatgggatgggcaatagtacccctatatttggcgttatggatgctaaggtgcaggacattatgctgatggggcaacttaaaaatcactgtaaggtgattttagccaccgccaatggtagcgttgatgctatcgcttggaatcgccctgatttgtttagacatatttttcaaggcatgaatgtgaaagttgcctttacacttcaaaaaaatgaatggcaaggttttgtatctccacaactcatgattcaagatatagagcctatcatagaagaacctattcaattaagtgctgaaggtttacgtgaaatatatacaattgtacgcctcgcattaaaaggcggcgctaattctttatactatgtggaacaagaaattttgcggcgtaaacccaccaatcaaaatggttcatctgcattgatggcccttgatgtgttcaaagaattaggtattattagcgaagaaacgaacgataatggacaagcgatgatccgttggaatgtcatcaacggtaagcttgatttgacaacatccgttacgtttattacatatagtcagcaggaggtgatacaatgatgaccataaatgaagaaggcaaagccttagttgaacaaaaaggctttaataaagaagaggccttaaaagagtttatggattatgtgcattcgtatctaggagatgatgaatgcgaccaaatcatgaaggctttcacccttgcagataaagcccatgaaggtcaatttagagcctctggtgaaccgtatatcatgcatcctcttgcagtggcagagattttggcgcatttgcaaatcgatcatattacattgattgcagccttgctccacgatgtcgttgaggatacggagtatacaaaggaagatattgaaaaattatttggcgctgaagttgcattcctcgttgatggggtaacaaaattaaatcagttccaatatgaaactaaagaagatcgccaaatggaaaattatcgcaagatgattttagccatggcgaaagacgtgcgcgttgtcgttatcaaactgggtgacaggttgcataatatgcgtaccttaaaacatatgcgtagcgataaacaaaaacgcattgctaaggaaacgttggaaatttttgctcctttagctcatcgccttggtattttcaacgtaaaatgggaactagaggatttatccttccggtacctagaaccagataaatactatgatctcgttgatcaaatgaaacaaaagcgtcaagcccgtgaagatatcgttaacgatacgatggaacaattgacgaaggctcttggtgaggccggtatcaaagcggatatcaagggacgaccaaagcatttttatagtatctataaaaagatgaaaaaggataatcgcgacttgtctcaaatttatgatttattggctgtacgcgttattgttgatactgtaccggattgctatgccgttctaggtattgctcatagcatttggaaaccgttgccttatcggtttaaagattatatttccatgccgaaatccaatatgtatcaatccttgcatactacggttatcggtacgatggggcaacctgtagaaatccaaattcgtacatgggaaatgcatcgtgtttccgaatatggtgtcgccgctcactggcgttacaaagaaggtaataagggcgctgataaagaatttgaccaaaaggttgcatggcttcgtcaagtgttagaatggcaagatacgtctaatcctaaggaacttgttaatgctttgaaattagacgtattctctggtgaggtatttgtatttacacctaagggtgatgtggtcaagttgcctatcggttctgtaccactcgactttgcgtatcgcgttcataccgatgtaggccatcgttgtgtaggggcaaaggttaatggtaaaattgtgcctctggattacaccttgcaaaatggggatatcgtcgatatcattacctctaaaactggtaaaccaagccttgattggctcaatattgtaggctcctctgaaagtaagaacaaaatccgtaattggttcaaacgagaaaataaagaagaaaatattgaaaagggtcttgaagcacttgagcgcgaagcaaaacgcctcaattatagttggaaagagctttgtagtgacaatcgcattcaacaagttgtaaaacagttgaagtccaatactgaaaatgaactatatgccgcttgtggctatggtgggataccggtaagtaccgttctattgcgattggttgaactatacaaaaaatcaaaagagcatgaagatgctcgtaaaacaacggaacaaatcattgaaaagttaaaggtacaaggggccaaaaaagctaagaatggcactggtgttctcgtaaaaggcgaacctggtgttatggttcgtatggcgaaatgttgtaatcctgtaccaggcgacgatattatcggttatattacaagaggtcgtggtgtttctgtacatcgctctgattgtacaagccttggtcatacaccggaagatctagagcgtatgattgaagtttcgtgggatgaagcatcgagtgaatccttccatgtaggcatcgatattcaagcctatgatagatcaggaatcctcatggaggtaatggcggtgctttcagaattgaaaattaccattaccaatatgaacgccaaagttcttgaaaacacgaaaaatgtaatgatcaacatcgttgttgaaattcgagatatatcgcaacttgattttgttatgactaaattgcgtcgtatccgtgaagtttacacggtacaacgtagtaaaggtggtgcataatggatacatcaaatttagttctcatgcgtatgccgttgggaccgcttggaaccaattgttatgtgataggcgataagaaacagggggaagcgttcattatcgatcctgctacgacagaagtgttggaatctttaaaaaaacataatttaaagccgaaagcagttctcttaactcatggtcatggggatcacatcggtggcgtacaaggcattgtagatgcttacgatgtgcctatctatatacatcataatgatgtgaaatacctaagtgatccggaattgaatctaagcaattatagcaatcctacaccgattaccgtaaaagggcgcattgtagaggttcatgaaggtgatcacatcacatgtggtgctattgatttgacagtatacgaaacaccaggtcacacacctggcggtgtatgctactatatgccgggtttagtatttgttggagatactttatttaatcaatctgtggggcgcactgattttgtagaaggtgattatgatgccctcatcaacgcgattaaaacaaagttatatacattaccagacaatacgatggtatatcctggacatggtccagaaacacaaattggttatgaaaaacaatataatccatttgtaggtgcttaattaatttatttagtaaaggggatagtaattatgaatacaacattggaaaaattaaaagaacgtattaaagacaaaaaatacaaattgactacacaacgtcaaacgattttacaagctttcatcgatgctgaagaaaatcacttgagcgcagaagatgtatatgtattggtaaaagaagtagcgccagatatcggacttgctactatttaccgtacattggatttatttacagaactagatttgttaaaacgtcttgactttggtgatggccgtaatcgttatgaattaaatgacgaagagtttgcccatttccatcatcatttaatctgtgtaaaatgcggtaaggtttccgagtttgaagatgatatgctagaaacattggaatctatcattgcaaagaaattgaatttccgtaccatcgaccatcaattaaaagtatatggttactgcagtgattgccaagcacatatgacgccagcagaacttgaaaagctcgataaaatggcacatcatgcttaatggatatcattacacagggccactaccgcttggatcggtagtggcccacaactgtggcgcagcagggctattttcgcgcaatgaaaaggctgatgtaatcctacaggctgttgagcgtgatgatatgtatgtcttgaccgtatctattcgtggcgttgaacatactttgacaggtcctgtatcttctatgggacgacgctcaataggccagtccttactcgtgttgttgcgtacagaacaaggtttacctgctcataatgagtggggcacgatggtaggggtgcgtcctactaaattacttcataaatatatagaccaatatggttcattagaggatgcaactcgtcacattggggacgagttttctgtgtctttggaaaaattagatattctcagccgtattggacaatatcaacgcccttttttagagtctcactctaataaggatataagcctctattgtggtattccattttgtgaaacacgttgtgtatattgttcttttccatacggtttatatcaagagtatcatcgacaatctgaatttatagcagccttattagatgatatagatgatgtacgccgaatttgtgaaagttacaatttgcacattaaaacgctctatatgggtggtggtacacccactatattgaataatgaagattttcatcgtgttttaactggattatctacattgatacctaaagggcatgaattcacggttgaagcgggaagaccagactctataaccactgaaaaaatacagtctatgcaagcgtgtcatgtgaatcgtattagcattaatcctcagacgatggacgatactatattacgtcgcatcgggcgtggacacagtgcacaagatatcgatgatatgtatcaatatgtaaaaaaacatacagattttgctgttaatatggattttatagcaggtctacctgggcaaaatataaaacatatggtgcataacatggattatatttgtcataatttgcctgaaaatgttacaattcatacgttagctatcaaacgcggtagtccgctatatgatttgaatatgcaacatgatgtacctgatgagtccgtggtaaaacacatggtgcagtatgctaaggagcgattagagcaggcaggttatgtgccgtattatctatatcgtcaacaatatatgagaggtcaactcgaaaatattgggtatacattgccaggtaaagcgtgtgaatataatattcaaatcatggaagagcggcaaacaattatgtctatgggaccaggtggatcatctaaatggattaaggcccctgcgtttagacagaaaaagcaacacatgccaaaggatgtagatgtatatacagatacattaaaggctttattagctaagaggcatgcattatgtaaatcattttgggaggttgtgtaatggctattaaaagaccaagaggtacacaagatttcttgccagaacaaattgtaaattggcattatatagaacagcatatgcgcgaaatttgtaaagcttatggctttagcgaaattcgcacacctgcctttgaagatacaaaattatttttgcggggcattggggaaactacggacgtagtatcaaaggaaatgtataccttctccactggcgatgacaaggaacaaagctatacattgcgccctgaaaatacggcttctgccgtacgggcttaccttgaaaataaggtgtatggtaaagaaaatttaacaaaatggttctatatgggttccatgttccgtcacgataaaccgcaagctggtcgctatcgtgaattccatcaatttggtgcagaagtactcggttctccatctcctgtagtggatagcgaagttatctgtatgattgtacagttgttgaaagatttcggccttaaggatctcaatgtagaggtgaactctgtaggttgtccaaattgtcgtcctacgtatcgtcaaaaattgatcgagttctttgaacctaaaaaagatcaactttgtgaagattgccaagagcggttgtacaaaaacccattacgtttattggattgcaaaaatgaaacgtgcaaagccttatccgtaggcgcccctgaaattcatgaacatctatgcgaagaatgtaatacccattttgaagaacttaaaacattacttgatgcggcgaatattcaatataatctaaatccacgtttggttcgtggcctagattactacacaaaaactgcctttgaagttcaatacactccattaggtgcgcaaagtgcagtagccggcggtggtcgttatgatggcctggtagaggaactcgatggtcctcatacaccagctattggttttgcaatgggcatggaacgattgttattggctttagaaaaacaaaacttgttgcctgaaccgacaatcgaaccagcagtatttgtagtagcccttggagaggctgcaaaattagaagctttcaagatttgtcaaactttacgtagcgcatatatcactgcggaaatggatggacaaggtaaaagtatgaaggctcaattaaaatatgctaacaaaattcatgcaaaatatgttatcatagtgggtgatgatgaattggctaagcaagaggccatcattcgttttatggaaacaagtgaacaagaaacagtgccattagcatctgtttctgaacgtatatcttctttggtgaaaggatgacagtagaatggaaacaatgaaaggcttacaccgtacacacggttgtggcactatttctgaagcagaagtaggtaaagaggttgtattatgtggttgggttgaacgtcgtcgtgaccacggcggtttgatcttcttggacttgcgagatcgttctggcattgttcaagttgtagcatccccagatcataatgtggaatctttccacaaggctgaagatgttcgtaatgaatatgtgctttgtgtacgtggtaaaattacaaaacgcgatgaagaagcaatcaatcctaacttgcctacaggcgcttatgaaatgtattgtgaagaacttcgcgtattgaattctgcgaaaacacctccattctacattcaagataatatcgatgtagatgaaaacatccgcttgaaatatcgttatcttgatttgcgtcgtccagaaatgcaacgcaacttgattttacgtcataaggtaacaaaggctatgcgcgatttcttcgatagccgcgatttccttgaaatcgaaacacctatgcttacaaaatccacaccagaaggcgcgcgtgactatttagtaccttctcgtgtgaatgcaggtacattctatgcattgcctcaatctccacaaattttcaaacaaattttgatggtagcaggctatgaaaaatatttccaaatcgtacgttgcttccgcgatgaagatttgcgtgcagaccgtcaaccagaattcacacaactcgacttggaaatgagcttcgttgatgaagaggacatttatgcactattggaacaaatggttgcagaagtgttcaaaaagacattgggcaaagaaattccattgcctatgcctcgtattacatgggatgaagcgatggataaatatggttctgataaaccagatcttcgctttgacatggctttcacagatgtaactgaactcgtaaaagatactgaattcaaagtattccgctctgttatcgacaatggcggtatcgtaaaaggtatcgtagtacctggtgatgctggtattcctcgtcgtgaactcgatgatttggtagcatatgtaaatcgctacggtgcaaaaggtttggcttgggcttgcttcaatgaagacggttccattaaatctcaaatcatgaagttcttaggcgaagatacaatccgcaatattggtgaaaaaatgggcgctaaaggcggcgaccttgtattgatgattgctgataaaccagcaactgttgctcgtgcacttggtgagttgcgccttgaaatggctcgtcgtatgaacatgattgacgaagataaattggctttcacatgggtaacagatttccctatgttcgaatataacgaagatgaaaaacgctatgttgctatgcatcatccgttcacaatgcctcgccacgaagatcttgataaattacaatccgatcctggtagcgtaaaagcaattgcttacgatatggtattgaacggcgttgaaatcggtggcggttccttgcgtatttatcaatctgacgtacaagaaaaagtatttaaagcaattggtttatccgaagaagaagctaaatctaaattcggtttcatgcttgatgcatttaaatacggtgcgccacctcatgcaggttgtgcatttggtcttgatcgtctcgttatgttgatggctaaacgccaatccatccgcgacgttatcgcattccctaaaacacaatccgcttctgatatcatgagccaagcgccatctgaagtagaacctaaacaattaaaagaattacacataaaaccagatgtagaggaagaagaacaatccttggtataatcgcaagtaagcatattataaaaggaccgcaagaattgctaaaattttaaaagtcaagtcttgtaaatgataaatctttctgctactatttatgtataagatatccctgccatgtgcgtgtgatatcgtagttttgagccaacacattttcttcgggagtccagaactctcgtctgaacgttacgccctcacgggacaactgcaggatgaggaggacacccacctgctcttgcaggatcaaaacgcggtacattacggcatggtggggcttttttgcatgtaaagaatgaatggaggtagcatggatagtttatttgatgcattacctacgaataaatatgaaccactaccggtgcgaatgagaccgacagaacttgatcatttgtatggtcaagaacaggcggtagggaaggggacattccttcgcgccatggtggaaaaggatacaataccatccatgttgttttacgggccttgtggaactggcaaaacgacattagccggtatcattgctaagatgagcaacagccattttgtcaatttaaatgcgacaaatgcaggtatcggtgaattgcgaaatattatagaagatgcgcggaaacgcgttcgttctttgcaacaacgaaccattttatttctcgatgaaatacatcgctttaataagagtcaacaagacgtactgttaccttgcgttgaagatggtacgattattcttattggggcaactacagaaaatccattttttgaagtcaatcgcccattattatcgaggctacgacttattacattggaggccttaacgccgaaggcaattagtcaaattttaaagcgagctcttacagatagcgaagtaggcttaggggctcgtaacttacaggtaaaggatgagttgcttgaggatataggtatcttcgtcaatggagatggtcgtatggcactcaatattttggagcaagctgcggccatggtacacgatggtgaagaaatctctttagaaatacttgaaaaggtcgtaggccgtcgcatttatacatacgataaaaaaggagatagtcattacgatacaatttccgcctttattaaaagtatgcgcgggtccgatgtacaggctacacttcactacttagcacgtatgatagaggccggtgaggatcctaattttatcgctcgtcgtattgtcatttgtgccgccgaagatgtaggattagcagatccacaagccttaatattggctaatgcagcagcacaggccgcgcatatggtgggatttccagaggcgcgtatcattttatctgaggcggcgtgctatgtggcgctagcgcctaagagcaattctgcatatctaggtattgatgcggctatttcagatgtgcgtcataaggactgtggacaagtgccggatcacttgcgtgatagccattatagtggagctagtaaactaggacatgggctaacttataaatatgctcataattattcgaatggatatgttaagcaacaatatttaccggatcctttaatacatgctgagtattatacgggcgtcgatcgtggggtagagcataatctgttaaaagattggaatgataggcgcaaagataaatagaatggtcaatatatggtataatataatgatgatttgaaatagatttttatataaaagtaaggggtttgtatacgattatggcagaagagaaaaaaacttctacacgagggcggaagcctcgcaaaaaacgagctacaccggcaccaaaaaaagaaggattttcactgcgtaatgaagtgaaaggcattattgtcataggtgttgccatactggcattgctaggcttttttggctttgatttaggcattgtaggcgaaatattgacgggaatatttcgctatggatttggctttgggggcataattccgtgcattgctgtactatggcttggatggcgtttattataccaaggtaaatttatgtctattacacgtcgtggtcttctcataacagttttttacttattagccattaccatggttccactatgtcgtgtgcctgtgggtgatgaattggcgactacagcgctggcagatcaaggtggtgttgtgggcggtttcttggcttcctttatacgaactatgttcggtgaagttggttccattattgttgttgccgtacttatgctttgctgtggacttcttattacccgattatccttgggaaacggattgcgtaaggctgctgataaaacgcaagtaggccttgataaggcaaaagaagtggctgttgaaaaggtagcggtagccaaagaggttatcgaagattggaatgaacagcgtaaagaagcagcacagcgcaaggcttatgaccgcgaaaaggatacgcgatacactgatgcagctcagaatgctgtagagactcttgaaaatagaggcgttgtagctgctaatgatgattatgaagttgagccaatcgatacacatacgccttcttcttggaaagaattagccgagttagaggctcgtaatagagcggcagaacgattagcacaaatctctgaagaatctggtgatgctgtcgataacggtgaaattcgtactgatagtatggatgatgagccaaaatcaatgcctgcatggctccataatcatgatgaagaacatgccgatattgaagaatttgatacagatgatagtgttgagaatgatgcatatggcaccgatgaatcaggcccagcagaatactcttatcaaccaacaactattggtccgttagaaaccaatcatgcggcgattgcaagtgccgtacctggtacaggtgccgctgctagttctgttagtgctggcgcaggcatgagttctatgccattatctgtaccgtctttggcaagtactgctgaggatacagctcaggtagccgtatcaaaagatggtcaaattcatagaacttatgacaaaccatatcatttcccaagccttgatattttggcgaaaggggaggtaggtcaaaataataatgacgaggtcgcgtataatgcgatgcgccttgaagatgttttatctagttttggcatttctgctaaggtagttaatgctacgcaaggcccaacggtaacacggtatgaaattgaaccagcccaaggtgttaaggtaagtagaatcgtaaacttaacagatgatattgctttgaatctagcggctcaacatatacgtatggaggcgccaattccaggaaaatctgctatcggtattgaggtgcctaatacgaaaacagaagccgttcacttgcgcgatgtgctagattgtagtgactttaaagaggcacgtggcggcattcctgtaggccttggtaaggatatcgctggtaaaccggtgattacagatttggctaagatgccacatttattggtggctggtacaacaggttccggtaaatctgtatgtgtgaatacattgatttccagtattctctttagtcgtaaaccagaagaggttaagttattacttatcgaccctaagatggttgaattatctgtatataatggcattcctcatttgatggcaccagttgtaacggatatgaaaaaagcggctgctgtattgcgctgggccgttcgtgagatggaagctcgttacaaggcgtttgctgcatccggtaagcgcgatattaaaagttataatgaagcgcatcctaagtcggcaatgccgcttatcgtattgattattgatgagttggcggacttgatgatgactgcgcctgatgatattgaagaatccattagtcgattggctcagatggcacgtgctgctggtattcatatggtactagctacacaacgtccatctgttaacgttattactggttctattaaagccaacgtgccaagtcgtatttcctttgccgtagggtcccaaatcgactctcgtacaatcctcgatatggcgggtgctgaaaaactattaggcaaaggtgatatgttgttctctccaattggggctaataaaccaattcgtgtacaaggtgctttcatctctgatgatgaagtggaacatttggtagagtttgtaaaacaacaacgagaaccagaatatgatgatacggtaacggctgaggcagaaaaggaaaccgcagcacaagataatgatgaacaagatatttatcgtgatgagttattagaacgagccgtcaatcttgtaatggaatctggtcaagcatccgtgtcgatgttgcaacgtagattccgtatcggttatacgcgtgctgcacgccttgtagataccatggaggatcttaaaattgtaggtcctaacatgggtagtaaagcacgagagattttaatgagtccagaacaggtgaaagctcgatacttctctgattctgaggaatagaaagggatatactgtggctgagttaggtgaagaattacgtcgagaacgagtacgtagaaatctcacatttaaagatattgaacaagtacttcatattaaaacaacctatttagaagccatcgaagatggaaactatgcagttatcccaggacgtgtatacgcgaaaggttttattcgcaattatggaaattaccttggccttgatggagatcgcttagtgaaggtttatcaaaatcaagtaggtgaagtggatacattcacaatacgtcctattatgcgtcaaaagaaacaggaaactattaattctgtgcagagtgagtacgttgaacatcagatggcaaaacgtcgtatgtcgcttgaaacgagacagaaaaagcgacaacgttccattgaacaagaacgcattatgcttgctattattgccgtattcatggtgatatttttgatatggttgtttttattctaagatacatcgttacagttaaaggaaggttatattgatggatacatttttagttacagaacgcgcagatatggaagcgcgcggatgggcagaactcgatttcgtgctcatcagtggcgatgcgtatgtagatcatccatcttttgcgcctgccgtaattggtcgttatctagaatccaaaggctatcgagttggtattattgcccaacctgattggaatgatgttaatgcttttaaaaaattagggaaacctcgtcttgcatcgcttgttactgcaggcaacttggattccatgctcaataagtttacagcagctaaaaaaatccgccgtgaagatgattactcaccgggaggtgaggcaggacatcgccccgatagagcgaccttggtatactctaaccgcatgaaagaagcctttagagatgtgcctcttatcattggtggcatcgaggcttcattgcggcgttttgggcattatgattattggtcggatacggtacgtcggtccattcttgtagattcaaaagctgatgtactcatatacggcatgggtgaattgcagattatagagttagccgaagcacttgatcaaaatcgattcgaagaatccttgccaaatattcgtggcatttgttatatgtcaaaagagattccatctattgagtgcgttgaatgtccttcttttgaagaaatcaaggctgataaaatggcctttgccgatgcttttcgcattcaatatgatgaacaagatccattctatggacgacctattgtacaaaaacatggagatcgctatgttgtacaaaatgtaccggctttaccattaacacaggaacaaatggatgcggcttatgatttaccatacactcgtaaatggcatccatcgtatgatgataaagggggcgtgcctgcattaagcgaggtgcagtttagcctcgttagtcaacgtgggtgttttggtagttgctcattttgtgctattaccaatcatcaaggccgtataattcaaaatcgcagccatcagtctttgattgatgaagctaagttgatgatcaatatggatgggtttaaaggctacattcatgatgtaggtggtccaacggccaatttcagacatttagcatgcgataaacaagccgtctttggtgcttgtaaaggtcgcacctgtgcggcgccggaaccttgtgaaaatttgaatactaatcacgatgattacattgcattattgcgcaagttacgaaagttaaagggcgtaaaaaaggtcttcgtcagatcggggttacgttatgactatgttttagccgacaataacaaagcctttgtaaaggaactttgtcaatatcatgtgagtggtcagctaaaggttgcgcctgaacatgtatcaaagcgtgtaacgactatgatgggcaaggctggaaaagaagaattcctgacctttaaaaaatggtttgaagaggcgaatcgtgaattagggaagaaacaatatttagttccttattttatgagttctcacccaggatgtacattagaggacgccatagaattagctgaatttttacgagatcagcatatgtatcctgaacaagttcaagattttattcctacaccgggcagtctttcaacgtgtatgtattatacgggtattaatcctcttgatggcaagcctgtttatgtggctaaaaaaggtcgggacaaggctaagcaacgagccttgatgcaatataaaaacattgaaaattacgacttggtaaaagaggcccttatcgaagctaatcggcgtgatttaatcggctttggatctgagtgcttaattccacctagaccaattggtcaaggtaaagtgcaaaaccaaggacgaaaaaaaacgggacaatcgagaggcggtcaatctcgatatgctcgaagtggttctccttcacaggtcaataagactaagggagaacgtaaaaggagatttacgcgatgaaacgatggatggcatttattgtgttaatgctttttgtcttaggtatgatggggtatggcatatacttttatcgagaggaacaaattgaaaaatcgaaagcgcctgtacgcggtgaaattacggtttacactgacttacctaataacttaacaacactattagctgataaatatttagaggataaaaacgtaaaagttaatattatgccactcactgaggagcaaatggaacaacgggtttcctctaagttagcagattcatctggtgatgtagtgattacatctgaggataatctcgtcatcggtgctagtaaagataagtttgctcctattgtaaatgaacgcatagatgaggtcttggatcgcctaaaggattcaaatggttactgggtcggcttatggtatgatcctatcgtttttgtacaaaatgaatcattttacaataaactaggtcaacatattacgacttgggataccttgcaaaagcctgggaactggcgtgtggtgatgacagatttcggagcttctcaaaatgcggctaatcttttgtacaatttggtggaatataaaggcgagccagatgctcttgcagatttattagctttaaaaacacatgttatacaacattctaagttcctttccacacctgtacggttaacagctcttggtgaatcggatattggcattgggaatctttctgatgcacaacagtacattcgccattcttatcctgtaaaaatgatttatcctagtgatggcacatcattttatataacaggtgcagcggtgcaaaaagattctaagcataaaaatgaaagtatagagtttattacctggttactatctagtgaaactgcaaaatatatgatgaataataattttacctatatattcgccaatcctgaagttaccgaacctgtagatgcactagggcgttccgtagtgttatggcctgttaatggcggctatacagtggagggaaaagaacttttattgaatcactgggttagccaagtacgttttagaaaagatcaatagaagagtatttttataaaatacgtatacaatatcgttacattctataaataagaaaggatttagaatgaccaaatcattgggatatattagcctaggttgtgctaaaaatttagtagatacagaggttatgcttggattgttaaaggatgatggttataccattaccgataatttacatgaggctgacttaattatcataaatacatgtacctttatagagaaagctaaggaagaatctatcaatacgattcttgaagctgctcagtataaagaaactggtcgttgtaaaggcttaattgtagcaggttgtttgagtcaacaataccaagatgagttgtttacagaaatccctgaaattgatgcccttattggtactggtgcatgggatcaagttatggtagctgttgatgcgattgagcatggcaatcgtagctgcatcatggaaaatatcactaatatctatgatgaacgcatgcctcgcattcaaacgacgcctcgctacagtgcgtatgtaaaaattgcagaaggttgtaacaatggttgtacattctgtatcattcctaaggtgcgtggtgcatttagaagtcgttccattgaatctattaaggctgaagttgaacgattagctgcgtcaggggttaaagaaatcgttctcattgcacaagatacgactagctacggcattgatttaaataatggtaaaccattacttacagagctgttaaaagaattaactaaggttgagggaatcgagtggattcgcatgctctatttatatccaacattctttagtgatgaattgcttgatattatcgtcaatgaaccgaagctttgtaaatatgttgatataccattacaacatgtaaacaacgatattcttaaacaaatgaatcgtcgtgattctcgtgaggatattgagcgattattaaagaaaatccgcaatgcaccaactcatgttacattgcgtacatcgattattgttggattccctggtgaaacagatgaacagttccaagaactttgtgaatttgtgaaggatatcaagtttgataacatgggtgttttcacatactctcaagaggaagggaccattgcaggagctcgtgaagatcaagtaccagaagatgttaaagaagaacgctatcatacattgatgtctatacaagctgctatttctgaagagaataaccgcgatttagaaggcactattgactatgccatgattgaagaattagaagaaggcgataatgatactgttcttgcaaaaggtcgtttgaaatcacaagctccagatgtagatgggaacatgtatatcgaagattgtggcgataaggttaaacctggagatattgtacaggtacaagtagagcaaggttttgcttacgatgtagtagctactatcgtagaataatattgattggtgtattaggtaataccactattaacacatctgaagtgatgggaggtatttacaatgattgtagaattaatttctacaggttctgaattattgttaggggatacggtgaacaccaatgtctcttggttagctcaggaacttaataaattaggttataccatagcgtatcagtctgtggtgggagacaatccaggccgtatgtctgaagtgtttaaaaaagcggcacaacgtgctgatctcgtgattagtacaggtggattgggtccaactcagggtgatataacacggcaagttttggcatcgtccttaaatcgcagtgtcgtatataatgatgatgctatggctgaggtgcgacggtttttcaaacgagtaggtcgtgaaatgcctgatgcgagtcgtagagaggctatgttgcctgatggctctactgttttagctaatcctgtcggtgttgcaccaggcgtagtaaccgtagatggagatgtaacctatatactattaccaggacctccaggtgaaatgaaggggatgtttacacaaagtgtagtgccttatcttcataagcgttttggttcacaaggtgttgtaacgtcttatcgttatggcgtttatgatattcgtgaaatcgatttagaagaacgcgttatggatttgattaagcaacaatcaaatccaaccatagctttgttaataaaaaaaggctatattgaattacgcattactgcaaaggcttcatctctcgatgaagcacatagactgttaaatccttgggatgaaatcattcgtcgacgtttaggttctttgattggccgtaagttagatatttctatggaggaaacactcggtaatacgttaaaagaatcgtctgcgaccattgctacggcagagtcttgtacatctggtttagttggtaaactattgacaaacgtaagtggtagtagtgattactatatgggtggcattatatcctatagcaatgatgtaaaacatcgggtcttaggtgtgccacaagatttactcgatacttatggcgccgtgagcgaacaagtagccaaagcgatggctgaaggtgcaaaacgcgtaggcaatacgacatatgcggtgtctacaacggggatagcaggccctggtggtggcacaccggataaaccagtgggcctcgtttggtttggcgtaactggaccatatggaaccgttgctcacaaagctaatcttattggtaatcgagaagatatccgccaaagtgcggctgaattagcattatactacatgaatttgtatattcaagaaaaaggggataaataatggctgttgatggtagacaagcagcgttggataacgcattaaaacagatagaaaaagactttggtaaaggtgctattatgcgcctaggtgaagcggcagatcgtatgaatgttgaggttatttcctctggttctcttgccattgacctcgccgtaggtgtaggcggcttccctcgtggtcgtgtcattgaaatttatggcccagaatcatctggtaaaacaactgttgctcttcacgctgtagctgaagcgcaaaaacaaggtggcgtcgctgcatttattgatgcggaacatgcaatggacccaatctatgcacgtaatcttggcgtagatattaataacttgttaatttcccaaccagacaatggtgaacaagccttagaaattacagaggcgcttgtacgtagtggtgctgtagatatcgttgtagttgactctgttgctgcattggtacctaaagcagaaattgaaggggaaatgggtgatgctcacgtaggtctccatgcccgtttgatgagtaaagcattgcgtaaattaacaggtactattaataagacaaaaaccgttgttatctttatcaaccaattgcgtgaaaaggtaggcgtaatgtttggtaatcctgaaacaacgaccggtggtcgtgccttaaaattctattcttctgtacgtcttgatgtgcgtaagggtgaattgattaaggccaataatgaaaatgtaggggcccgtacaaaggttaaggttgttaagaacaaggtggcacctccatttaaaactgctgaatttgatttgatgtatggtcaagggatttccagagaaggtactcttatcgatatcggtactaatatggaaattatcaaaaaatctggcgcgtggtattcctataatggggaacggatgggacaaggtaaagaagcggcaaaacaatacctcttcgacaatcctcaagtagctgaagaaatcgatcgtatcattcgtgatacattggcagctgaaccagaaacatttgatgttgttggcgaagatgctacaccagaagaagattaatcgatatagcatataaaaaagggctactgtgtagccctttttcactgaggttattatgatagacgatatgtttacagaagaggaaaagcaggctgcgttagatcaagcctatcgatttcttgcacagcgctttttaagctcttatgagctgcgccaaaagatgaaacgaaaacagatttcgtcggatctcatcgattacgtagaagagcgattaatttactatgattacattaatgatgagcgtttagcgaaacaggttgtatcctatttgatgagagagcagaaatatggtgcatatcttataaagcaaaaaatgaaacagagaggccttgatgtgcctcgtgatattgaaaattatgatgaaatggcagctgcttttcgaatcgtagataaaaaatatggtgaatctataagcgatattccgcgcataaaaataatgaatttcctaaaaaacaggggattttctatgagcactattactaaggtttgcgaggcctatcaatcttgacagaaagggctttcaagcataaaattaaaatagccttgtaaacatataatgtattataggttattaatttaatatgttaaaaatcaggaaacaaggggcgtagtgcccgtatgtgaagatacaggaggtgagactgattttagagtatagtctaattgcagtagtaatggtgctaattggactaggtgtaggctattttttacgaaaaaatattgctgaaggaaaactgaatcaagctgagcaagaggctgagcgcattgtcgcaaatggcgagcgcatggccgagtctaaaaagaaagaagctttattagaggcgaaagaagaaattcataagctccgttctgatgtagaacgagaaaataaagagcgtcgttctgaattacaacgtatggaacgccgtattcttcaaaaagaagaatctttggataaaaaattagacaatattgagcacaaagaggaagctttacatcgtaaagaagctgacttagttcaaagcaaagaaaaaattgatgctttgtatgaaaagcaaatggcagaattagaacgtatttctggcatgacctttgatgaagctcggaacatcttgttaactaatgtagaacaagaaatccgtcatgaaacagctatcatggtaaaagaaatggaacagcaagctaaagacgaagctgagaaaaaggctaaggaaattatttccggcgctattcaacgttgtgcagctgaccatgtcgcagaaacaactgtttctgttgtcgcattgccaaatgatgaaatgaagggacgtattattggtcgtgaaggtcgtaatattcgtgctctagaaacattaactggcattgatttaattatcgatgatacaccagaagctgttattctatcaggctttgatccaattcgtcgtgaagtagcacgaattgcattggaaaaattgattgtcgatggtcgaattcatccagctcgtattgaagagatggtggcaaaagctcgtaaagaggtggaccaaacaattaaagaagccggtgaacaagcaacctttgaggcagatgttcatggcttacatcctgaaattattaaaattttagggcgtttgaagtatcgtactagttacggtcaaaatgtgttaaaacattctatcgaagtatctcatttagcaggtcttatggccgcagaacttggctgtgatgtgacattggctaaacgaggtggtttaattcatgatatcggtaaggcgctagatcgtgaaatcgaaggttcccatgtggaaatcggtgttgatgtagcccgtaagtatcgtgaaagcgcagcagtaatcaactgtattggagcccatcatggtgatgaagaattccaatccgtagaggctgttctcgtagcagcagcagatgctatctctgcagcccgtccaggtgctcgtagagaaaccttagaaaattacttaaaacgattatctaaattggaagaaatcgctgaatctttcgaaggcgttgaaaagtgctttgctattcaagccggtcgagaaattcgcgttgtagtaaaaccggataagattgatgaagctgaatctacattacttgttcggaatattgtaaaacgcattgaatccgaattagaatatcctggtcaaatcaaggtagttgttattcgtgaaacacgcgttgttgattttgctaaataagcattataccaaaattgtaggctgcaatattatattgcagcctatcctttttaattgtaggctattatattagaggatttttgaaagttttatcgaatatagaattatagacccttttttctatgactgtatagtcgataaaatataaaaattaaaaggaggtgttctggtgagtcgatattttgaaaatgaattaattgaacaaattaaagatgccaatgatatcgtatccgttgtatcagaacacgttacattaaagaaaaaaggtaagaattattggggttgttgtccatttcacaatgagaagacgccatcctttagtgtggctcctgacaaggggttttattattgttttggctgccatgcatcgggaaatgccatcaagtttttgatggaactagaaggaattacctttgttgaggccttggaacggcttgctaatcgagctaatataccattgccagaagcaaagctttcaccacaggtgcgagctagagaggaacggcgaaagaaattatatgaggcctgtgatttggcggccaatttctttcataattgcttgcttaaaacatcatatggtaaggccggattagagtacttaaaaaagcggggactcacagatgaaaccatagaaaagtttagacttggatttgcccctgatggttgggacagattgtataaggcttttagagaacggggcattgaagaatctattttgcttgaacttaatttaattcgcaagaatgataaaggtcaggcctatgatttcttccgtaatcgagtcatatttccaatcatggacggtaaaggccgtgttgtcggctttgggggccgtgttatggatgatagcacgccgaagtatttgaactctcctgaatgccaaatctttgaaaagggtaaaattctatttgcctttgataaggcttataaatcgatacgcgaagaaaaacaagccatattagtagaaggctatatggatgttatttccgctcataataagggtgtaaccaacgtagttgcttcgttggggacggcatatacaaaggatcatggtcacatcttgatgcgccaagcagatgagattatattggcttacgatatggatggcgctggccgccaggctgctacacgcgctattgaattgctacagaatacggattttaaggttcgcgtgttggctatgcctgatggcaaggatcctgatgactatgtgcgaaatcacggcggcaaagcttttaaggaattagtagaaaaggctgttaagccgctcgattatttattaagtgaatctcttattaagcatgatacgaatgacgcagaaggcaaacaggcggttatgcaagatatattcccttatattgcgaatattcatagtcaaacgattcgagacgatgcattaaaggccttagcattgccattatggctagataacagtactatattccgctattttagaaattatacccaaaaggggaatattgaattagtcgatgaaaagattacacagcctaagacgattgtcagtggtgatgaagagttattgatggctcatgtcattacagattcaaaggctttacaagaggtagtacaatatttaccgcttgaggactttcaaaatattcaatatcggggtataatagaaaagatatacaccttatttactcaaacaggtcaatatcagccggaatctgtggaggacgtattgacgcctcaagaatatgaaattttttcacggcttatgataattgaggcaaatgaggctgtacctgtacttatccgtaaaatacggctacattccttacgggaacaatataaaatgcactcaattttggccgatcagttaaaacgtgcaggagattcgacatttattagcgaattacataaatgtcaggaaatacaaaatctaattagagaatggtctaaatagtaagtaataaaggagagcgctgtggctaagaaagtacaaaaaagtcaaatagaggagattgtggcacaacttcttgaaaaaggccgtaaaagcggtgtgttgacacaatcagaaatttcagatgctcttcatgagcaaagtgagttaacagcagaacaattagatgatatttatgttactttcaataaactaaatatcgaagttgttccagatgttgaggacgatgataaagacgatgcccttgaacctgatgatgatgtcgataatgaccgtgatgctgcgtctgaaaaaaatatttccattgacctaagcgtagatgctagtgttaatatcgacgatccagttcgtatgtatttgaaagaaattggccgtgttccattgctttcagctgacgaagaaatcgtattagcaaaacaaattgaagcaggggcagaggaagatgctacatataaagaaattcaacttagcaaaaaggctaagaagaaattggtagatgctaacttgcgccttgttgtaagtattgctaaacgttatgttggcagaggcatgttattcttggatttgattcaagaaggtaacttgggccttatcaaagcggtcgataaattcgactatacaaaaggttataaattttccacctatgcaacatggtggattcgtcaagcgattacgcgggctattgcagaccaagcgagaacaatacgtattccagttcacatggttgaaactatcaataaattgattcgtatttcccgacaattattgcaagataaaggcagagaaccaacgccagaagaaattgcagaaggtatgggtatcactgcggaacgtgttcgtgaaattcaaaaaattgcacaagagccagtatctttggaaacaccaattggtgaagaagaagactcccatttgggcgatttcatcgaagaccaagatgcggtggcaccagatgatgcggctagctacatcttgttgcaagaacaaatcgaagacgttttcacatgcttaacagaccgtgaacaacaagtattgattttacgttttggcttgaaagatggcaaaccacgtactcttgaagaagtaggccaacactttaacgtaactcgtgaacgtattcgtcaaatcgaaggtaaggcgttaacaaaattacgtaatcgtggtaagcgcgataaaattaaagatttcttataagaatgtcttaaccattaggggtgctgtacatatacatgtatggcagcccttttgtgctataataaaagtaatgtaatacactaagtttttagatatataggggataacatgtatactgttagcaaacgtttagaggtgagtgcatctcatcaattacaattagattatccaagtaaatgtcagaatttacatgggcacaattggattataaccgttcatgcgcgtagcgaagaattagatcataatggcatggtgattgactttacgatcattaaagaaaagattcatggccgtcttgatcataaacatattaatgacgtattaggggatattaatcctactgcagaaaatatggcgaaatggattgccgatgaattaggcccaaaatgttttaaggtagaggttcaagagtcagaaggaaatgttgctatctatgaacgtgattgaactattttcttccattgatggagaagggaaacgacaaggatttttgacgacctttttgcgtctccatgactgtaatattcgctgctcttattgcgatacattgtatagttatggtcctgaaagcacttttgaaagcatgagtgttcaggctgtagctgatgtgattgaacaattagaaaatcatcgcatcaccattaccggtggagaaccgcttttacaggaaccggccattattgaacttattgatgagttaacaagacgtaatgcgcgatatgattttaatatagaaacgaatggtacaatcatacctagctttcatagagataatgtatggtttacctatgactacaagacgccgtcatccttagcagaagatgctatgaacttagatatattcaaggtagctacacctgcggatatcattaaatttgtagttggttctatgcaagatttagaccgtatgaatgaaattctaaaaatatatcctacagaagcgcagattttcgtatctcctgtatggggcaatattgaaggggctacgattattgagtatatgaaagcccacaattggcagaacgttagattccagctacaaattcataaatttatttgggaccctgatgcgaaaggagtataacatggacacaaaacgaatcgaatctctagtgtatcaattactggaagcattgggagaaaatccagatcgcgaaggcctcgtagaaacaccaaaacgggtggcccaaatgatggaagaaatgtttgaaggcatccaatatacgaatgcagacattgcggatatgtttggtaaaacctttgacgtcgatacaaaccaaatggtaattgtaaaagatattacctgcttttcccattgtgaacatcacatggccttgatgtatgatatgaacatcagcatcggctatattcctcgtggccgtgtcatcggcttgtccaagatgccacgcattgcagaaatgtgttgcaaacgattacaactacaagaaaaaatcggtgaagacattgccgaagtcatctccattgccaccggcaccgacgacgtcatcgtccacatcacaagctcccatagctgcgtcagcgcccgcggcgtaaaatccgccaacagcaaaacaaccaccctcgccacaaaaggcgtcttcgaacaagacgacatgatcaaccgattcctaacactcaaaaacgcataagacagttatcctgcctaatcccggagcaccgtagatactgaaaattttttgctcacggaatgtagaatagagtagaacatgcagttcctctcaaacgacttatctcctgtttgggcccagggcactgtgaatactgaaaactctcaggtgctcagttgtcgtatagtaacaaaaagaaggcttgtccaaacaactttgtctgtctaatcccggagccccgtagatactgaaaatttcttgcttacatagatgtcgaagtgtaacggaaaggtaccgtccacaaatgatttttcctttttaatccgggattcccgtagatgctgaaaattcttaggtactcagttgtcgtatagtagcaaaaagaagggttgtccaaacgactttgctaagtcgaggccctaggccgaagactgttaaggcggtggaggcttgggcaagccttctttttgtggtcacgtagataacttgacgtacctaagaattttcagtataattttatacgcaagcttgggcctatagctcaggggtagagcaaccggctcataaccggtcggtccctggttcgatcccaggtgggcccaccaaacttgtataaattgaatcaatgaaacctgctccgattggagcaggttttttgttataatatagatatgaagagtagatggtatgaaggtcgatggacctgttagtatacgaggtagttatgaaagcaagacctatgatggatcgtttagaggcggtctttgatatcgttccccatgcagaatctattgcagatattggaacggatcatggttatttagctgttgagttaattgtgagaggcaaggccaaacgcgttatcgctggtgatgttcataagggccctttggaatcggccaagtcctatgttacatctcgagggcttagcaatgtgatcgactgccgccttggtgatggcttgcaagttactaaaaagggcgaattaaacggcgccatctgttgcggtatgggtggatttttaatgcgcgatatcgttgagaacggtccagaaccgctggggttttatgtgttacaaccccagaatggccaggccgaattacgccaatatatggtggaaaaaggataccgtattgtcaaagaaattatcatgaaggatatggggaaaatgtacactgcatttgtagccgttcgttctgactgtgtcgatacatatggtaacaatgctagctattcgattcattctgacgatgctctttatgatacattgccaaagacctctattctttggtctgtaggggctttattagccaaagagaaacctgcattgtggaatgaatatgtagattttttgatatatcaacgacaatgtgcgctagatggcatgacagtggaactttcacatacggagaaatataaacaattacaacatgaaatagatgaattggccagcctgcgctaattatcggttaggagtgatacgatggtgttagcaaaacaaattatagaatcgatggaacaatgggcaccgcctcattatgctgagtcatgggataatgtaggccttatggtgggttcgaaacaacgggatgtatccaaaatcattacgactctcgatattacaccggaggtcatagaatatgcgatagttgaacaggcccaaatgatcattagccatcatccatttatttttaaaggtttgaaatcattacatttagatagtcctcaaggaacattaatcgagaaactgataaaaaatgatattgttgtatatagtgcacatacgaacttagatattaccattggcgggctcaatgatatgttggcgaaccgattaggattgacgaatgtgagaggctttgttccgaccggttctgatatggtatataaaattaccacctttgtgccgacagatactgccgatgcagtacgtgaagcaatggctagtgctggcgctggtcgtattggcaattacgaatcatgtagctttagttttacaggcgaaggtcggtttagaggtaatgatgaatcccatccggtcattggtgaagctggaacattgacggttgtaccagaggtggccgttaatgttatcgtagatggtgctcataaacaggctgttatcaatgctatgaaagaggctcacccttatgaagaggtggcatacgaagtatttacgttacatgaacctaatgtaggtcgtacgttaggtcgtatcggtgaattgcctgagactatggattttgaaagcttccgcgagcacctccaagaatctttgccacatgctaatcttagatttggaggcattaaaaaagattctattaaaacgatagccctttgctctggtggtggtgcagagtttatcaaaaatgcagttaaggctgatgcatatgtaacaggagatgtaaaataccatgatgcacagctagctaaagaactaggtttactcgtcgtagatgcaggccattttggtacggaagagattgtggctgatggtatccgcgattatttacgagatcaatctgacaaaggtggttgggatattactgtacaatcctttgagaaccaagcagattttttctttgaataaaaatctattttaatagtaaatttcgatattcttgcatagtatatacagctatgataaactgaattgaagcaagtatgaaagacggttgcgagtccattggactcgaggaaagtccgagctccatagggcaggatgccagataacgtctggcgagggtgaccttagggaaagtgccatagaaaaggaaaccgccacgtcagtggtaagggtggaaaggtgaggtaagagctcaccagcagtctggtaacaggctggctcggtaaaccccatccggagcaagaccgaatagggaagggttaacggtggtcccgcctaccttccgggttgtgtcgctcgagcgtgcaggcgactgtacgcctagaaagataatcgtcaccgcgcaagcggaacagaactcggcttaatgattgcttgcttcttatatagtttataatatgtaacacataaaggaggcctttcgatggctattactgctattacaagcgtagaacaatttgatgaattagtattaggttctaaagagctcgttattgtagatttttgggctggctggtgcgaaccttgcacagttatgcgtccagaagtagaagctgtagcagaaaaattggacggccgcgttaaattcttcagcgtagatgcagaagataagactttgcgtcctattcttttaaaagaagatgtagaaggtattccttccatggtattctttaaagaaggcaaactattagatcgtcttgcaggttacaaaaaagctgctgtattagaatctttgatcaatgaagtgattaaacaattctaattgatgagaacacctagctggataatagtagatattatccagctaggtgctttttttatcaatttttttgatatatatacataatgtcatagttttatgtaatttaaaatgatataataagttaatcgagataatatatctctcaatagttatagttgattaggtaatatatacatattgctgcaaagttgttgtaaggaggctgtattccatgaaaaatcgtgtgaacagtttatggactctcttccaagagagacgtctcagtcgacgtacatttatgaaatcttgcgtggcgttgactgctattctagggttgccacctactatgcttgatacagttgtaaaagctgcagaaacaacagaattacctactgtaatctggcttcatggtcacgaatgtaccggttgtagcgaatcctttattcgctcttcctcaccatttacatccgatgtaatcttgaatatgatttctttggaatatgatgatacattggctgcagcatctggagaacctttagaggaacaccttaaaaaaatcattgctgagaaaaatggcaaatatatcctcgctgttgaaggtggggttccattggatgaaaatggtatctactgtacagtaggtggccgtacatttaaggaatctttagtagaagctgctaaaggcgctgctgcaatcatcgagtatggttcttgtgcatcttggggcggtattcaagcggcaaaaccaaatccaacaaatacagtgtctgtatcctctgttgtatctggtaaacctattattaaagttcctggctgtcctccaattccagaggttatgactggtgtagttatgcactacgcattatttggtcaaattcctcctttggattctcaaggccgtcctaaacaattttatggcaatcgcattcacgatacttgctaccgccgtgcgttctttgactccggtttattcgttgaagaatttgacgatgatgcatccaaagctggttggtgcttatataaagtaggttgtcgtggacctcaaacatataattcttgtggtaacttgcgttggtggaatggtttgtcctatccaattcaatccggtcacggttgtattggttgctctgaaaaaggcttctgggataatgatgtattctacaaacgattaccagatattccattggcaaacaccattactacagctgatacaatcggcacagtagctgctgttggtgctaccgctgcagttatcgtacatggtgctgcaactcttacgcgtaataaaattcttgatatgaaagaagaaaaacgcttgaaagaacaaggcttatgggatgaaaagaaacataataatggaggaggtcactaatgaaacgcgtagtagtagatccgatttcccgtattgaaggtcatttacgggttgaaataaaagttgatgaagcaagtggtaaggtagaggacgcattgtcctctggtactgcttggcgtggcatcgaacttgttgcaaaggaccgcgatcctcgtgacctttgggcatttgtgcaacgtatttgtggcgtatgtacaacaacacatgcattggcagcgttacgtgccgtagaggatgcacttggtatttccatccctaaaaatgcaaactacattcgtaatatcatgcatagctctttagatgtacatgaccatctcgtgcatttctatcatttacatgcacttgactgggttagcccagtagctgcacttagtgcggacccagctaaaactgcacaattacaaaatgacgtattagctacttataatgtaagtggtctagcgccagctgaaacagcatctaaagattctgcatatcctaaggaattccctaaagctacaactgcttactttacagctgtacaacaaaaggtaaagaaaattgtagaatctggccaattaggcattttctctgctcaatggtgggatcatcctgattaccaattattgccaccagaagttcatttgatggctgtatctcattacttgaatattctagaccgtcaacgtgacgtagttattcctcacgttgtattcggcggtaaaaaccctcatccacactatattgtaggtggtatgccatgtgctatttctatgaatgacatgaatgcacctatcaatacacaacgtcttgctgctgtagaacaatctattgcattggctaaggatttagtaagtaatttctacttgcctgatttattagctatcggcaaaatttacgttgaaaaaggcatggtcgatggtggtggtcttgcgaaaaaacgcgttatgtcttatggcgattaccctgatgatgcgtatacaggtatttctgatggcgattaccataaaaaatgtatcgttcgctctaatggtgttgtagaaaactttgcattaggtgtagataaagctacatttatcccattagaaggtaaggattttatggatcctcaatacctcagtgaagaggttgatcactcttggttcgcatatccagatggcactagcacacttcatccactcgatggtgtgacagaccctaaatttacaggtcctaaatctggtacaaaagaaaaatgggaataccttgatgaagataaaaaatattcttggattaagtccccaactttcaaaggcaaaacagcagaagtgggtccactagctaaatatatcgttgtatatacaaaggtaaaacaaggtattatcactgatccaacttgggctgaatccatgatggttcgtcaaatcgatactgtatcccaagtattgggtgtgcctgctcatgtatggatgacgacaatggttggtcgtactgcatgtcgtggccttgatgcacaagtggcttctaatattagccaatacttctttgataaactcgtagctaacatcaaaaatggtgatactactgttgcgaatacatctaaatttgagccaaataaatggcctaaggatgctaaaggcgttggtcttgtagaagcacctcgcggtggtttggggcactggattcatatcaaagacggtcgttctgcaaactatcaatgtatcgtaccatctacatggaacgcatgtcctaagaccgcagctaacgaacatggtgcatacgaagactctatgattgatacacatgttaagattgcggacaaacctcttgaaatcttgaaagttatccactcctttgacccatgtctcgcatgtgcaacccatttatacaataaaaaaggcgagaaaatcgtttccgtcaatacagatgcattgtgtaaataaagggtggtgggcttatgttaatacatactgacaaaaaagcgtatgtcgtatttagtttatggctacgcatattccactggacaatggtgctttccgtaacagctttattctggactggcctttatattggtgatccaggttttgcagctattacagggcatccggaaccaactttcgctattgatggctggttctctatggagacgatgcgtcgtatccatttcattgcgggtgttattttgacattctcctttatattccgatttgctggtgcactttggaatcgcggagatagattgttgcctaaattccgtcaaaaacggtattggtatggccttcgcgaaacaacattgcactatttgatgattccacaaaagcatgaacatcactggttacgtaactccttggcgagaacggcatatatgatggtgtacatcatgttcttctttgaaatcatcacaggtttttcaatgtatgctatgattgatcctaatggtattataggaactctttttgcaccgattattacgctatttggtggtgaatataaagttcatattatccatcactatattgcatggggcttcttattctttaccattattcacgtgtacatggcattccgagaagatgttatggaagaatctggcgaagtatccgctatggtttccggcatgaaatattatgcccatgatcctatcgatattgaagaccttaacggtaaacgccgtcgtggtgaacgtatcgataaaccatctggtactacatatcgtccaagcaatcctgacgatccacgagaaaaggaattacaagatgactaatatatccactgaagaacaatttggtggcatagaatacgcgggctctgagagcccgcgtattgatttacatgccatttatgatgattatgagaactctattgtcgtcctaggggtaggtaatattttgcttaccgatgagggccttggagttcatgttgtagaagatttgaaaactaattatactttcacccctcagataagcttgattgatggcggaacgatggggatggaattattgacctacatgcgaggcatgaagaaaattctcttgattgacgccgttaatggtggtgaagcacctggcacaatctatgagttcccacatcgcgaattagaacagtattttacggaccatatttctgttcatgaagtaggtatgcaagatatattgcgcattcgtgccattcaagaaaatccattggaagatgctattgttataggtgttgaaccggagtccttagacgtaggatttgaacctagcgcacctgtacaaatggcattacctgaggtaaaagaacgcgttctacgtgttcttcgcgaatggggcgtacaaatcgaacctaaataaactgatatgtttatagataaataagaatagattgataggatgagaaaggagggacactatgattgaaaattacaataatgtacgtgccgttctaaatgagttgcgtcaagcactaaagcaattacgtgaaactggtgcaacctattccatatatattgagaagacaggccttgctgaagaagagcaagtagaggtgctagaaactttagggcgtggacatattacgattaccttcaatgaaacagatcaacctgtagaatggtatgaatctcaattttctggcatttgggttggtacctataaaaatggtcgtgatgactcaatcctacatacggtagaggtagctcgttatcctgaagtagtaggtgcttttgatgaagatatggtgacagcagaagaagatcttacgacatggattgatgctgcggggctataaaacaaatagtttaatgcctatatatatgatatgcgtaaaagtgtataaatataacgttttaataaatagatagcttattaataagcgcttaagataagattgtaatatgaagagaatgaacctcaaaatcctgaaaagtagcatagctatggggattatgaggttcatcttctttattgtcaaccttttaaatttgcctatattgacgatttaacgctaaaatatagaagtaatcgacggaggatatatgttagtttcaattgttgtacctgtatataatgaagaagaaaatatagctattttttacaatgccgtaacaaaagttatgacaggtctaccttatgaatatgaacttatctatgtcgatgatggatctacggactcgtctgttgtcgttttgcgcgagattgcaaaactcgatacgcgagttaaggtcgtgttattggcacggaactttggtcatcagactgcgttgacatgtggtcttgattatgccaaaggtgatgcggtaatcaccatggatggtgatatgcaacatccgccggctttgattccagaactgatacgtttgtgggaggctggttacgatgtggtacgtaccatacgcgactctacggaggatgccagctgggcaaaatccttcacatctaaatattattataaactgatgaataaaatggcagatgttcccatcgtagaagggggatctgatttccgtttaatgaatcgtaagtcgctagaaactttgaaacatttccgtgaacacggacgtttcttgcgtggcatcgttggtgcacttggctatcgccaagcggaacttcactttgttgcgcctcctcgctttgcaggggtttcgaaattcagtgtgcgcaaaatgattcgctttgcccttgatggggttactgcgttttctcgcgtgccattgcgtgcggctttgtatgtaggtgtcctatgtgggggcttgagttttctcttgattctacatttgctctacgtgtacttaacgggtcaagcattaaatgggtggaccaccttgggcgtgtccatattatttatcggtggtatccaattagttggacttggcatcattggcgaatacgtaggacgcgtattcgaagaggtaaaacaacgtccattatattgggtgaaagctgctataaattttgatggtgaaaatccagaaatagcttatgaaccatcaaaagctgatatatttatagccaatcaagtacctggccctgaagaagataaagactagctgtatttgttggatgcaaatagagagacggttagtatattttgaataagtaaactcactttgaagttttaggaaggaagaatatgaagtcaaaatatagtaagagtaaaattgcggcattaacattaacatttgtatgtgctaccactgcgatggcaagcgctacaacattacaatatggtgataaaggtagaaacgtaatcgctgtacaacaacaattaattaaacacggttacaatgcaaccgataaaaatggtgtgtatggtaaggaaacaaaatgggctgtacgcctattccaacaagatcgtggtttacctgtagatggtattattggaccagcaacgtacaatgcattgatgggtgctcctcgtacaacaaaagcagtattatccaataatgcagctacaaaagcggtggcaacaaaatctgctttcacaaatcaaaatgctcaatctagacgtcttgcaggccaaaacgttaagttgaataatttgaaaaaggtacaaacgccaaacaatattcatgctattttggcagaagccgataaataccgcggtgttccgtatgtatttggcggtactacaccaagtggttttgactgctctggttatgttaaatatgtatttgcaaaacaaggtatttctttgccacgcttagcggatgaacaatacaatgtaggtgttgaagtttctcgcgcgaacttaaaggcaggggatttggtgttctttgaaacctatgaaccaggtccatctcattccggtatttacattggcaatggtaaatttatcagtgctacatctagccgtggcgtagccgtagcagaccttgatactggttattggggcgaacgctatattggcgcgaaacgcgttatataatatatggtttctccatgtagaaccattggtgaactatatatgagccataaaaaggggctatacgaatcaattatgttctgttgatttgtataacctcttttttgtatctctttttatggcaactaaatggaatagagaatgctaatgaaggttaattatatccggatatatataggttataatagattttctatggtttttacgttataattaagagtaaattattttaggaggaatatacacatgaaaggtaatgaactgcgtcaagcatacttgcagttttttgaaagcaaaggacatttaaaattagatagtttttctcttatcccagaaaacgatccgtctctattattgatcggggcaggtatggcgccattaaagcctttctttacaggtaaattggtacctccttgtcatcgtattacgacaagccaaaaatgtatgcgtactggtgaccttgaaaacgtaggccgcacagcacgtcaccatacattctttgaaatgcttggtaacttctcctttggagattactttaaaaaagatgctattcattgggcatgggaatttttaacagaagttattaaactcgacaaaaacagattatatgtcactgtatatccagatgaccaagaagcatatgatacatggcacaacgattgtggcgtagaagaaagccacattacacgccttgaagataacttctgggaaatcggtgaaggtccatgtggtccagatagcgaaatcttcttcgaccaaggccctgaacatggttgtgatgatcctaactgtgcacctggttgtgactgtgaccgttaccttgaaatttggaacctcgtgttcactcaattcaataaaatgccagacggttcctatgagccattgcaacataaaaacatcgatactggcgccggtcttgaacgattggcttccgtattgcaacattgcaaaacaaactttgaaacagatttgattttcccaatcatagaagcgactgcaaaacgcgctggtgttaagtataacgaagacccaaatacagatgtatccttgaaggttattgctgaccatgctcgtgctgtaactgcgttgatttccgatggtgtattaccatccaatgaaggccgcggttacgtattgcgtcgtatcttgcgccgtgctgtacgtcatggccgtttgcttggtatcgaaggtttattcttaacaccacttatcgatgtagttgtagacattcttggccctggtatcaaatccattgctgaaaaacaagacttcgttaaacgtgtcgttcaaaacgaagaagaacgtttcaaccaaacattggaacaaggtcttgagttattaaattccttaatcgatacattggctgctgaaaaagcaactgtagttcctggtacagaagtattcaaactatatgatacatatggattcccttgggaattaacagaagaaatcgcatccgaacgcggtttcacaatcgaccatgaaggctttgacgctgccatgaaagaacaacgtgaacgcgctcgtgaagctcgcgtaaaagaagatgctaaggtagctacaccagatattacattcttaaaagacgaagaacttgtagaaaatgaagcagaaacggcatcctctgtattgatgcttggtaaaggctctgaacgcttgcaaaccgctgttgatggcgatgaaatcactgttattgtgcgcactacaccattccatgctgaagggggcggtcaattaggtgatactggctttatcgttggtccaatgggcaaggtagagattcataatacaaaacgcttaccagaaggtactgtataccatatcggtactgttgtagaaggttccatctccgaaggcgatgatgtaacgcttgaagtagatacagctcgtcgtgcagcgatggctcgtaatcatacagcaactcacttgttgcatgctgcattaaaacgcgtgcttggcgaacatgttaaccaagcaggttctttggtaacaccagattacttgcgtttcgacttcacacatttctctcctgtaacacaagaggaacttgatcaaatcgaagcccttgtaaatgaagaaatccttaaggctacagatcttgctattgctgaaatgtctatggacgaagcaaaagcgaaaggtgctatggcactctttggcgataaatatggcgatgtagttcgcgtagtagaggttcctggtttctccgttgaattgtgcggcggttctcatgtaggcaatacagctttcatcagttccttccgcttaacatctgaatccggtatcggttctggtgtacgtcgtatcgaagcgattacaggtcgtgccgctctcgatgcagcaaaacatgatcgtttgactattgaacgcattgctagtgaattaaaaactaaacctgtccaagtagaagaacgtttgcaccaagtattggcagaggctaaagaaacagctaaagaattagaccaaattcgcaaagaggtttctgctgcaggtgctgctgatatcgtagctggtaaggttatgattggcgatgtagcatttgttgctgcgtctgtgaaagcatcctctattgatgaattgcgtgatttcgctgatatgggccttgataaattagatggttctggcgtagtactcgtaggtgccgctatgggcgatgacaaggtaaactttgtatgtaaagtttccaaagatgttgtcggtaaaggcgtaaaagctggtaatatcgttaaagcagcagctcaagtagctggtggtaatggcggtggccgtccagatatggcgcaagcaggtggtaaagaaccagctaaattgatggatgcattaaaagcagctggcgaagctgttaaagaagctcttaacgcataatacgttctataggtatatcttgcatatgctataatagaaacatacaatacatatatgtgggccacgtacgtggcccattcatacaaaggagggatacccatgaaggtttcagatgaaactatgttattccgtaaagtagacgatgaaccgatgactgccgaagaggtattgactcgcgtttataaatctattcaagaaaaaggatataatcctatcaatcaaatcttaggttatcttatctctggggatccagcgtacattacaagctataataatgcacgtagtgatattcgccgtttagaacgtgatgatttaatcgaagaattattaaaagaatacgcaaaggctaaacaactataatgagaattatggcattagacgtaggcagtcgcaccattggcatcgcatgtagtgatgcgctattgatgactgctcaaggtatagaaacgattcgtcgtacatccttagaaaatgactttaaccgattgcgtgaattgatttcagaatacgaagtgcatgaactcgtagtgggcatgccgaagaatatgaacggcaccaagggggagcgcgctgaaaaaacggaagaatttgtcgaaaaaatgaaggctgtcatcgacttgcctgttacattttgggatgaacgtttatctaccgttatggccgaacgtcaactcattgcagctgatgtgagtcgtaaaaaacgaaagggcatcatcgataaaatggctgctgtcgttattttacaaggctatttagacagactacaatttagtaaatcttaatttgcatagatatctaatgcgaatatcaaacaggttcttatatacataataaaggagggaatacccatggttgatcaaaattacgaaggtgaaattttctatctcgaatttgaagatgaagatggtaacaaacaatattttacagaagatgtaatcttgaatcatgaaggtcaagaatacgctgtacttgttcatgtacaagatgaagatcatgaaggtcaagatgatacatatatgattttggctcgcatcgaaacaaacgatgaaggcgaagaggaatatgttccattagatgaagatgatgaaaacttcgaagtattggtaaatatgtacgaagcaatgggggaagaagaataatttctaagccctcaaagactctagtataacggttgttatactagggtcttttttgtaattgtaacctcttgtgtactaattgactcatggttatttggtttgtggataatataaaagaagagatacatcgaaagcctttaatatgatataataagatgatatacaatggtttgtaatagaaaggaactcatccatgagaaaagccttaaaatatgtttccgtaggtgttcttagccttgctattttaggtggtggtgctttaggtgcatcctattttgtaccaaatacctttaacgatgacggaggatctcaagtcctcgtaataggcaaggatgcaacaggaacagaaattgccgatatgctctatgaacatggactaattcggtctacacaggtgtttaaattatggttagctcttagtggaaccggttcaaaattacaatctggtcactaccaaattccaaataaggtatcggtccatgaattaattaacttattacaagagggtcacgttgagtccattaaattaacgattcctgaagggtataccgtaggggatatcgctattgctcttgaaaaagctcaaattatgaaagcttccgatttcttggcagaggcgaaaacattcgtcccatacccatatatgaagggtactaaaccgactacatatcctgtagaaggtttccttttcccaagtacttatgaagtgccagttggtgctacgccaaaggatgtcattttgatgatgtctgagcaaatgaatcgctatttaacaccagctgttaaaaaacaaattcaagcacaacacatgagtattcatgattttgtaaccttagcatccatcgttgaacgtgaatcattatatgatgcggatcgcccaaccattgcgggtgtatttaagaaacgcttagcacatggtattccattgcaatctgatgcaactatttcttatgttcttggttatgcaaaggaaaatgtaacgcttggagatacgcagttacaaagtccttacaatacatatgtaagtaaaggtttgccaccaggaccgattgcaaaccctggtaaaaaggcattagatgcggtacttcattctgaagatacagattatctatactttgtagccgataaagatggtcataatcatttctccaaaacatatgctgagcatttggctgaggttgaaaaaatttatggtgctgaacaagcgagtgcaggctcttctaatcaaggtcaggctcctgcattggcacaagctggtcctaactatgacgtagcggctacatcagaaccagattacaactacagctctgctgaggctgtagcggcagattctcaatatgtagatgtagaaccaacatatacatatacaccgacaactgtaccggcagcaactcaagtaacgccagcgccagcagcaccggcagcaagtgaacaaccggctacaacatcatcgcctagccaaataccggaaagcatgcaacaagtagttccacaacaatcggcaccggttcaatcggcacctgcagtggaagaacctcgtgttattcgacctagcacacaaactacacctgcttctggtaatactcgcggcggcgttgatagataattagcgtattcagatactgtaaactattatattgtattagcatgtcatatacgcacataccttgtgcgtatatgattactttcatagtcaaaatatatagcgggaatttataatacattttatggaattaaatgagatattaaatgagcagcgtatttacgcgatgattaataatgtacccatccttcgggaatctgaggtgcatttatttgaagaattgattggattataccggcccacctctgtgctagaggtgggcaccgccattggttactctacattactgatggcacctcttattgaacgaggcggaaaaatcacatctattgaattggatgaggttcgccatgagatggcgaaatattatataggtcaatccgagtataaggatcaaatcacgttgattaaaggtgatgcgaaggacgtattaacgcaaattaaaggtgaatatgatctcgtatttctcgatgggcctaagggacaatatcttaatcagctagaggtcatattacctcatgtgaaagaaggcggcgtcatccttgccgataatgttctctttagaggctatgtgcgtggcgacaaagaggcgccacatcgattcaaaactattgttaagcgattacaagcgtatttagcatatgtagaaaataaagaattatttaacaccaccatttacccgatgggagatggcatgagtgtaagtgtgtggaaaggacacaacaaataatggcagatcattttatggaattgctttgtccagcaggtaatatggacaaattaaaaatggccattcgctatggtgcggatgccgtttattgtgcaggtaaacgatttggtttacgtgctggtaactccaatttttccgacgaagaattgaaggaagccgttcaatttgtgcatgaacatggcaaaaaaatccacgttacatgtaatatcattcctcacaacgaggactttgaaggtcttgaggactatttgaaatttcttgaaagtatcggtgtcgatgcgattatcgttgctgatatgggtatctttagcttggctaaacgcgtagcaccaggccttgaacttcatgtgagtacacaagcatccacgacgaactggcatactgtgcaaatgtggaaggaacttggtgcggctcgcgttgtagcagctcgcgaagtatctgtagcggatcttaaggaaatgaaggaacatgtagatattgaaatcgagtctttcgttcatggttctatgtgtatttcctattctggtcgttgcttattgtctaactacatgacaggtacacgcgatgctaaccgcggtcaatgttctcaatcttgccgttggaaatacagcattgtagaatccaatcgccctggcgaatattacccaatcgaagaagatgaacatggcacatacatctttaactccaaggatttatgcctcattcatcgcattccagaattgtatgaagcaggcatcgatagccttaaaatcgaaggccgcatgaaatctgttcactattgtgcaacggtagctaaggtataccgtacagctatcgatacctatttgaaggaacgtgaaaactggtacgttcgtccagaatggattgctgaattagaaaaaatttcccatcgcccttacacagatggctttgcgaatggtcgtcctgatgaaagcgcacaaaactacgggaaatctacgaatactcaaacccatgatttcatcggtttagtgcttggctataacgatgaagaaaaatatgtggaccttgaacaacgcaataatttcaaggtaggagataaggtagaattttgccaacctaagggtgaacttgtagaggctgttatcgaaaaaatgacagacgaagatggtaatcctatcgacgtagcacctcatgcgcaaatgaaggttcgtttgtatatggatacaaaattggaaccatattccatgatgcgccgcgagtgcaaggtgaaagcagagtaacatggtacatgaaaatactgctactatgtcaatgcttgacgaaatgacacctgatgagacgataccgttacgcgataatcaagaaccattgatgccgtcccgttcattgtctggttttcctgaaccgccttcgtatagcggcacaggggaggaaggatatttgtactttcacatagatccaaaacataccaattatgtcaatcgcatcttagaaggctatgaatacgtaggtgttatgactagcctagacaagtcggggcgctgcatggtgcggtgtacaccggatacgcgcagtctagccagcgaaatcctatcgcgcttgccagaggttaccttagaaatatagttcaataacatcgattagagaattatccaaatttaggagaataataatgaaatgtaatgtattaaaacgcgcatttgttttaacagcacttggtgcctctatggcaacagctgcttttgcagcgccaaatggtcctgtcatgattccacaaccaggtacggttgttgtgattaaccataatccagatgtaacatttgctggcaatattaactttgatgttgaaagccaagaaaacaataatttgaaaattggttctactgttgtaccaaatgtattatatggtgctgtattcaacaagtccggtgctcctgatacaattgtgccagcacaaacctatgtatttacaggtgccaaagaagtgcctgctgcgttgacatctcctagcgatgaaggcaaacctggtgcaacttggtctgtagaaactattaagaaaactaaatctggcgatattcaagtggctagccgtggtgtacctgaaaaaccattgggcgtacaaatggaaatcattaaagatactttcacaataggcgctatcgacaacagtaaaactgtacaaggtcaaaacagcaagggtacattgtacatgactgtgcctaaggatttgaagctaaatcctagcaacgacattcctgcagatgttcgtgaaacaatgccagctatgcttcgtggccgcatgggcgaatctatgatggttaacctattgccattgaacgatgaagaaaaacaacaacttcgcaataacccgcacaatgcgaatgctatcgtatttaaccgtgctatgggcatggcgagcagcatcggcaactccgctaaacaaagcaaagtatatacatatatgaaagatcattaccttaacatgattattgttgcaaaagattatgatgataatggtgctcgtggtagcggcgtcttgatggtatctaaacaagacaattccgatgacgtaatgttgatcctattcaagggcccagacattacaaactctaaaattgaaaaagttattggatccatgctatctgcgcactttgaacgtaaatagatagttcttggaaatactacaggcctgtactaatttttagagagatgtgtatgcgtatctttagaaatagaacaggcctgttctattttttaggaggtacttatatagttgaaattttttagtacctatgataagatatcttagtaaaagtgatgcaaaggacatgattctcatatccctgtgtaccagagagaggcagatgctggaaatgccttacacatatatttgagttaccccctttaaactgatttgtcgaacctaagtaggcaaatacggccgccaccgttatcggactcaatgaagtgaatgaactgtatccttgtgatgcggtgaattaactagggtggaaccgcgaatgatcttcgtcccttgttttgtagggatagggggtctttttttattacaaaaatccagtctatcctagataataaattggaggaaattaaaatggcagatgtaaaaatcattttacctgatggtagtgcaaaggaatacgctgctggcactactcttggggaagcagtaaaaaaattgtctaatagtttggctaaaaaagtgttagcagccaatgtaaatggagaattaacagaccttcgtgaagaactcgtagatggttctgaagtagccttcttaacatttgaagaagatggtggtaaacacacattacgtcacacagcttctcatgttatggcacaagcagttaaacgcttatggccagaagcaaaattagctatcggtcctgctatcgataaaggtttctactatgatatcgatatggaacatacattgactcctgaagatttgactaaaatcgaaaaggaaatgagccgtattgtaaaagaaaacttgcctattactaaatctgtaatgtctcgtgaagaagctatcgagttcttcaaatctaaaaacgaagattacaaggtagaattgatcgaagaccttcctgaagatgctgtgatttcttgctatgcacaaggcgattttgttgacctttgtgcaggccctcatgtagcatctactggtaaggtgaaagctttcaaattacaaagcattgcaggtgcatactggcgcggcgatgaaaagaacaaaatgttgcaacgtatttacggtacagcatttgaaaagaaagaagaactagatgcataccttcatatgcttgaagaagcggctaaacgcgaccaccgtaaacttggtaaagaacttggtttgttcgttatcaaagaagaaggtcctggcttcccattcttcttgccaaaaggcatggctcttcgcaacgaattagaaaacttctggcgcgaagtacatcatgatttcgaatatgatgaaatccgcacaccaatcatcttgaataaacatttgtgggaaacatctggtcactgggatcattaccgtgaaaatatgtatactacaatcattgatgacgaagaatatgcaattaaacctatgaactgcccaggcggtatcttagtttaccaaaacgaaatgcattcctaccgtgacttgccacttcgttatgcagaacttggtttagttcaccgtcatgaattgtccggcgcattacacggcttgttccgcgttcgtgctttcacacaagacgatgcgcacgtatttatgttgcctgaacaaatgcaatccgaattgatgaaagttatcgaattgttcgaccgtatctatagccaatttggtttgaaatatcatgttgaattgtctactaaaccagacaatgcaatgggtgatgatgcaatttgggaagcagctacagaagcattgcgtaatgctatcgaagcaaaaggcatcgattatgttatcaaccctggtgacggcgcgttctatggtcctaaacttgattaccatatcgaagactccttgggccgtacatggcaatgtggtactatccaattggatatgaacttgcctgaacgcttcaacgtagaatatatcggtgaagatggtcaaaaacatcgtactatcatgattcaccgtgcatgctttggttctatggaacgttttatcggtatcttgactgaacactatgctggcgcattcccaacttggatggcacctgttcaagtgaaagtattacctatctccgaaaaacacgtggaatacgctaaccaattggcaaaacaaatgcgccatgactacgttcgcgtagaagtagacgatcgcaacgaaaaaattggttacaaaattcgccaagcacaaatggaaaaagttccttacatgctcgttgttggcgataaagaaatggaagacaattccgttaacgtacgtaaacacggtggcgacgaattgggtacagttccattcgacgaattcttcaactccattaaaattgaaattaaagaacgcaactaattatataattattgatatatctgattatttatctatcattttttgatggatttaacgatatttggtcaataataatttagtataaaaaatcctcttatatactggacagttatctttagattttataatctaatagtagcagttcatatataaggggatttttctttcattatagtagcgggagaaattataatgaacatcttattatgattaggtggtgaccttgtgtggagaagtcaagtttagcttcaattttgcaacgtaaaaagaataaaaatcttacgctcgctcatcgtcaattatgggggatgattgacttgatttataaagatttctatgataaagaatctaaaatctatgatgctggcaatgtaacacgtgaagaattttctattattaaacatgtatataaaactaggcatgtagtaaattatacggaaatcaaagccttgttaaataacaaacaccttagtcatgtggggtgggttataaaaaatcttgagaaaaaaggtttagttaccactgtaaaacattggagcgaccaacgatctcgggatgtattgctaacaaagaaaggaattcgtacctatgaacgcatatcatcaacgcataataaggtaatgggagccttattttctcaaatacctaaagaacaacgagaacaaacaacaagactattaattcatatacataatagaatggcaaagaaacctatagctaactttattgattcggattatatccaataaaaataaatagaacaggcctgtactaatttggaaaaggtgtgaatgtgcatctttagaaatagaacaggcctgttctaattttgggaaggtgtgtatatgcgtctctagaaaaagaacaggcctgtactaatttgaggaagatgtgtatgtgcgcctctagaaaaagaacaggcctgtactaattttgggaaggtgtgtatatgcgtgtctttagaaatagaacaggcctgtactaattttaggaaggtgtatatacgattccaagaaataaaacaggcctgttcttttttaggcaatccctatccagtgccagtatgtaagtgcaaatacgagcatcattacatagccgatgatggtcaaaggaatacctgttgtcatgaatgtttttacgtcgaatgtgtctgtaccgtaagccaccataccttgtggtgagtttactggtaatactagaccaaagcagatggcatattgcatgatcatggttacgccaattggattgagtccttctgcattatgacctacaacgatggagatgacgattggtatcatcgctgatgaaagggcggtagcagaggcaaatcctagatggattacgatgaggaacgcagccatgatggcaatcaacaagaacaccgtagcggattctaaagagaatgcgttaacgaatacttgagcgagccatgtggctgcttttgttttaagtaaaactgtaccgagaccgataccagcaccaaacataacgatggaaccccagtcgatgtttggttgtgcgaatttccaatccataataccaattttagggaagaagaatagggcaatcgctatgattgtagtagttgtagtatcgatggaatgtaatttaccacctgtagcccacaatgcgagtaaaccgatggagatgcataagagtttcttttcatcggtgctcataggaccgatttctttacgcatcttagcgagttgaacatcgccgccaacgagttctttgaactctggtttaattaatgcttgtgttaagaagtaggcaataattaccatgatgatggaaaatggagcagcagctgtgagccagtcaatccagctaacagatgtattcatctgtgtttgcataaatcctacggccacaaggttttgggcggccgccgtttgaatcatgatgttccagaatgtatcagcctgtacagcgcccaccatgagaagggccgcaacgcggcttttacgttcaatacctaagttctcaacgataccgataatgatcggtgccaagcaggcaatacgagccgttgcactaggtacaaagaatgctaggatgaggcccgtaatgataacgccgagataaatgcgacttaccttggtgccgacgctagataaaacgagcatggcgatgcgtcggtcgaggccggttttgcgcatggctacagagataaacatagcagcacctacaagaatcatagctggtgaagaataaccagaaatgatcagctttaaggcattggctgtgcccatcgccttagcaggtgcttcgggattcggtgagaaccctaatagtagagcggtaagtgctgtaatcatggtagcacttactggataggaaacagctgatgtcatccacaagatgatggcaaaagcgagtacaccaattatacgatgaccacctgtagataatgtgtccggtgtaggtaataataaaatgccacctaaaacaatgaaggataaaataagtccaatattttgagcagttgtacgtgccttttgtggaggggcagtagttgttacactcataataaaactcctttcaatttgtgtaatacctattactgtataataataaataaggtaaactatataaactagattatcctataaagtatactattctataaagtacactattctataaagtacactatataagctagactattctataaatattattgtatcgtattttctatagaattagttatataatttataagaatattgtatacataaagagagagcggtgtcagtaagtatatgtaagagtataatacatttgtgacaagtgaataaaaaatgagaaggaactctgttataatgaagttgcttaatccaaacattacaacaaaaggagttccttctcatgcattctattataactgaagaattaagatttcgtaaacgagtatgtgaatatgctataaagtatggaaataatgctgaagctgcacgccgttatcatactagtagacaacaagtacaacgttgggtgaagcgtttcgacgggactatcgattcacttcgattgtatagtcgtaaaccacattctcatcctaatcaacacactgaggaagaactagcacttatcaagcgtatgcattctaagtttaaacatgaagggctgtctcaagtatatgttgaggcaaaaaagcgtggttataaacgctcatatggctctatgtgccgacaaataaggtgtcacattaaagagaaaaaggttgttaaatctgttccaaaaagcaagtggaaaccagatctagtaacatatccaggagaaaaggttcagattgatataaaatacgtacctcgcgagagtttagccttttcaacacaaggaaaatcttactatcaacttacagctattgatgagttttctagaaagagaattctaaaaattatagatgaaaaaagtgttactaatacaagtcggttcttattaaatttagaagccaaaatgggatttcctattcatacaatacaaacagataatggtcgtgaatttacaaactatggagtaaaagatcgagagtgtttatttgatattgtattaaaaagattagaaatagagcataaaacgacaagaccattttctccgtggcagaatggaaaggtagagcgcagtcatcgaattgatagtgagagattttattctcgtaagtttaatagtatggagagttttctaaaagcacatagtcgatatgctaatagatataataacattgcacaaaaagtcttaaactttaaatcaccaaaccaagttataacagagtactttatgaatcaaaaggcataggtatttgtcacaaatgtttgattactctagaaagagagagcggtgtcagtaagtatacctatatacagaacttataatgtctgttatactataagagttgtaataacaaattcattgttaaaagctcaatattttttgttgactttcaccagtcaatttgttattataattaagtaatttatgaagcagaggccatccgccactcacctaataccatgaagtatgaggttacatatagagaactctattcggatggtgtatgccatccgttttttttattctcttggaggtgaaagctattagcaaggatacaccacgcattaatgaagagattcgtgctcgtgaacttcgtgtcgtaggtcctgaaaacgaacaaatcggtattatgtctggccgtgaggcgttggcattggctgaagaaaagcatcttgatcttgtggaaattgcacctaacgctaaaccaccagtagctcgcattatgaactacggtaaatatcgttatgaacaacaaaaacgcgagaaagaagcgaaaaagaaacaaaaaatcgtaactttaaaagaagttaagttacgtccacatattgaagaccatgacttttacgtaaaaatgaaaaacgcatccaaattcttgggtgaaggtaacaaagtaaaagtaaccatcatgttccgcggtcgtgaactttctcaccctgaacttggcatggcagtgttgacacgtttcgctgaagaactcaaagaaacggcgtctattgaaaaagcagctaaattagaaggtcgtaatatgaccatgattttagtaagtaaataggatattgggaggattataattatgccaaaaattaaaactcgtcgcgcagcggctaaacgtttcgcagtaactggtactggtgaattcaagcgtgcaaaagctttcaaaagccacattcttgagaaaaaatctccagctcgtaaacgtaatttacgtaaagctacattggttgctaaatctgactacaaacgcgtagttaaatgcttaccatacgcttaatcgctaactattagattgatatatcgtaatttaggaggaatatacaatggcaagagtgaaaaagggcgttacagctcatgcacgtcataaaaagattttgaaattagctaaaggttaccgcggtactcgttctcgtttgttcaaaaaagctaacgaaacagtaatgaaagcgttgtactacgctcgtcgtgaccgtcgtgcgaaaaaacgcgaattccgtcaattgtggattgctcgtatcaacgcagcagctcgcatcaatggcacaacttacagccgtttcatcgctggtttgactaaagcaggcgttgaagttaaccgtaaaatgttggctgacttggcagttaacgatgcagcagcattcgctaaacttgttgaagtagctaaaaacgcttaatagcataccataacaaattaaggactctctttggagggtccttttttgtatggtgaaagcctcctctagtacgatggtacagaaacaataaaaaggagatttactagtttatggcgaaatactcagtatagatatttcgttaacaaatctcagatagaggagggattagtatgaacgtattaaagaaagctatagttttaggggccgtaggtgttatgttagccataccaggctatgcaaaggttgtaactggtagccaatcagatgctaacttagatctaaaatatccactagtttatacagatcatgcttatgcgcaacaggtaattaatacagacattgcaaactatgtgctagaagcaaaggatatgtattacaaccaacatatttataaggtggctcaaaattataaggtaacctatgaagatagccaagttgtttccattctattgacgacctatcattactatgccggtgccgttcatggtatgactaataccagaggacttgtatataataaaataacaggtcaacgtgttcctctatacaattatgtaaaaatcgctaatgcagaacagttggacagaggattacgatcttatgtattagattactacacaagttcccatacaaagagccgtattcctcaaggctggagtgtaaaatatgtaactgataactactgcctacgcggtaaggggaacattgatctagtttaccaaccatatgaattaggaccttattctaatggcactacttatattggatttacaccgcaatctattgaatactttaaccgcatgaactcgtaataaaggtggcgttatagttgtatgtaacattattaatgatacccatcggactgttcttactggtgattagccttcggtatatggtaaaaatttttactatctcggacatacatgatatgccctatagaacggataaaggtgtctttaccattgaaacagctggtcgctacggcgtatggcttaatggtaatcgatttaaaaagtctcccttagggatgtttggattgcagctgattaactgtgaaacagaaaaggaagtcccattaagaactagctatatacccgctagcgtgactaaagtaatcgacgtacgactcgagctttatacatttcatgctgagccggggatatatcaaatcgtatttaacgataaccctagtccgatggctaagatctttggcaacattagtcgatttttgatgggtggtaatgatgattatagctcttattccatcagaatctatccacatcaatctatgatctattcgttccttagcatatgggggtttatatttggaattatggccatactgtgggggatagcgggattgattgtgcattaataaaatgtaagatactttgaattttgtatttttgctatataacgtaaagtatgttatattataaatacaaagagagccatcaacgtgtagctagcgttaggcccatctacaaaattgcaaatttagaatgcgcctaacgtgtaagcactgcgaatgcttttatacgttaggcgtttttcttactctattttaaaataaaagtaagaatggatactgctagagacaatatagcaatgatgagcattactttttcataattgttcatagcatcaccacctttcggtgatgagcctaactcacgttgatgactctaggttcagtataaataagtgtcgacaatttgtcgacacttatttaaccttgtttatgttaatgttctatagagttatgtatacttatagatgataaaagcctatagtacgaaaatcgtactataggcttctgtcatgtctaatatcttatcttctatatccgccacatcctctagtattagagtttgaaccgcaatagttttggttgttattgttgcatggtgcatagttagcattgttattgcagttgtattgtgtgttagtattgcaattgtactgagaattattgcatacataatcataagcaaatcctgtggacactacagcagtcacggctaaagcagtcatgatgagtatacgtttagtaaatttcatagtaatcacctcctagtttttatacttatattatactactataagtcaaacgaaatatgatattctatacatatatactatttgagagagtttatgtgaaaggaagcgttattatgatgaaacgtgtattgatggctacgctttgtttaagttgtgttacattgggtggtcatgcaattgatattaatatacctggtgcagatccgacggtatcaaaggatgcgtatcagaactatcgtaagactgatgcggatgcgcaacagatggaatgggatgttgaaaaggatataaaaacatatatgcctaaacaagtagtaggtaatggcgaatttgatttaaatgatatcatttattcaaatcgtgagttgaaccatgcattagatttttcttcatccatatttattttgaaagaggatggagccaatgtaaaattcaccatgccttattcgagtcgatatgggaatactgagaagattgcagatggcacacctgctttcagaaatgcaatgattatgagccccaatggtatgatggcttatgaattacgtcatcaaccagcaggcaataattgggaggatagtaagattccttatagcaaattgactgttgatgatatgaaagctatcgcagagaaaacagctggcgtatttcgtggtgatgaccattcattatatgctggtaaatttacgtatcctacgattgaaaaagcgacatgggatgtcacgtatgctaaggatgcaccaatggtggggagtcttaattttacgatgaagaatacaccgacgatttcgtatcatgtgggttataattttatgcctagaaaacagtttagcgtgttaaaagctcaaggtgttgataagactaaagacatgataatgtctccgttggtaaactatgtattaccatccattgaaccagcgaaggatatactttcaaaaagcaaagcattaacaattaatgattttacattcttaacgctaaaaacaagtaaaatgatacgggaagataagaatgattcgtacatgtatgtatacgatagcgatcagtatagagaaggtatcatggttatgccagttgaggctgaagatatacaacatccagaaaagattttcccgaaagctgtacgcagtattattctaactgacaagtattcgatgcaccaaccaatccaatttgctaccgtatggaatgatgctatgtcatccgtatatatgcaaattaagcgccctaaaacaacgatttatatgttaatatcccatgataaacaatacgtatacaatcactttattatgacctataatacgaattctttggtcgaaaaagacttgcgagatattgtgcaatatgtagacactaataacaataaggattattataatacattccaaagtggacttggggctaagatgccaaaagatatggcgacggttgatattaagaatacgaaataatagataatgtaaggaatttaaaaataccttgtgaagtaactctcaccataggttagattttttcatgtaactataggctctctcttgtgaggtatataccttgtgatagagagctttttgtgtgtgatgaaagttaaaaaagagctttatttttctagaaaatatctttatttcttatgctaaaaggcgtatactatagataataatatagaacatatatttgtgtttaaagagaaaaggaagatgtatgagtgatgatgtaaagatgtttgaaggtagtcaaattcgttctgtgtgggataatgaaagggaagagtggtattttagtgtagttgatgtgataggttctttgactgaaagcaataatccgcgtgactattggtatcgtgtgaaaaaacgtatgtcagaagaagaacgaagtgagttgtcgacattttgtcgacaactgaaacttaagtcgacagatggtaagtcatataagactgatgtagttgatatgcaaggtattttccgtatcatacaatctgttccatcacctaaggcagaaccttttaaaatgtggttagcagaggttggtaaagaacgtattgatgaaatcattaatccggaactcacgattgatagggctttagaatcatatgcgcgtaagggctatagccgagaatggattaatcaacgattacaggccattcaagttcgtaaagaattaaccgatacttggcaagatcatggtgttaaagctggtaatgaatatgctatcctaacgaatgaaatctctaaagcttggtctggaatgacgactagagaatataaggactttaaggggctaaaaaaagaaaatctacgagataatatgtctactacagaacttatcttaaatatgttagccgaaacggctacaaaggatattgcggaggcaactaatcctcaaggattagacgagaataaacaagttgctcaagatggtggttctattgctggtgatgcacgtaaatctattgaagctagaactggtaaacctgttattacctctaaaaatgccatagacttgggacgactaattagtgatgtggtgaaacatgatagatgaacgacttgaacgaatgaaacgaaaacataattgtagagtgcattttgatgcagattcttttccgatatctgattgtactgtagcactagttcacgacatacctgatgtagtatatgaaaatcaggagtttgatttttatgttgagtctacctatgatgtatatctgctccgaatcatacataaccaagattgtgttgtaagtatttatcctgcaaaagtggatggcattatatatatcgtgagttctatacctgtttctaaagatagtatcaaagaaaatattcaaaagattttacatgcgttggagacatatggatttccgaaattgaagaatcccaaaagtagtattacattttgtatatagtgaggaagtagagcgtaaagaaaataataccacatcagatagggattttttgtcctgtatgatgtggtattttgtatataatatatatgtcactttatattattgggtattattacgaatttagtgcgttattattctataaagcaaagcgtactttaaaatttggatgaataattatataataattacaaatgtaacattaatttgaaatgaggcttatatgcaattattaacagtggatattagcgaagaagggattgctaatgattctggaacgctgttgacaattttactaaaagatcggactacaaataaaaatattgtatgggcttctccttcttatgaaggtatggggaagcctttttgtgctgaccagcctattaaaaaaaatctaattataggtccttatgactcgattattcaaccacgtgttgaaaagaataaacgtaatcaagagctacgcactcgtaaacgtggtgaagtatttactccaccttggcttgttgataagcaagtatctattgtactggatgaaataggagtcatttcttttgaaagcttcattgctttacgttggttagaactggcttgtggtgaggggccatatatagtaactcgttatgattctataactggcgacattattcctgttgataaacgtgttggttttttagatcgaaaattgcaaagaatagctgaacaatcaaatacggagaaagagtttataaaatggtctaaaatagcttatgaatctagctatggctatgaattacaaggtgattcgttactcttagcgcgtgaaaatttgttattatcattttgtgaatattacgattataaatttggtaaattaccgacaatgaaggtaattaaacaaatagcaaccattatttcttataatatattccaaatgaatggtttaactaagcaaaccccatattcagatgattcaaagggcaatattcaacttaatctatttgatgaagtaaataatctagagaagcaaggggatatgtttacgcttgtcaaagattggaaaaataaagtgttagtatctatggattcaatttctaagggagatgaaatgatgaaatttgatgtagtaattgggaatcctccatatcaggaggaaactgaaggtacaagtgataaacctatttataattatatgatggatgcagcagaagagattgctgataaagtctgtttaattacacccgcaagatttttatttaatgcaggtaaaacacctaaagcttggaatcgtaaaaaacttaatgaccctcattttaaagtaaattattatgagcaagattcttctagagtttttccaaatactgatataaaggggggcgtagttattacttactccgataataaagaagaatttgggcctattggaacatttactccttttttagaattaaatactattatggataaagtatctttgattagtggggatgattcttttagtgaattaatttatgctccagaaagttataaatttagtcaatgtattcatgttgaacatccttatatagaaaatagattaagtaaaggtcacaagtttgatgttaccactaatatttttgagaaattgcctgaactctttcactcacaacttaatcctaatgaaaatgaaagtgactatattaaaattattggccgtgaaaataatgttaggtgtgagaagtggattaaaagagtgtatataaatagtccagataattttgttaattataaagtaattttacctaaagctaatggttcgggcgtattaggagagcctctatcaacacctttaattggcaagccttattacggacacactcaaacatttatttcagttggtagctttaatagttacgatgaggcggatgcttgtattaaatatataaaatcaaaatttgcacggactatgcttggaattttaaaagtaacccaagataataaaaaagaagcttggcgtaaagttccacttcaagattttacctctaattcagatattgattggtctcagtccattgaaaatatagaccaacaattgtacaaaaaatataatctttcacaagatgaaatagatttcattgaatcaaaagtgagggctatggactaatggggacagagattaaaacagggaaggttgtagaacctaaaatctatgcatatactacaccacaggttaccactaatgatggatggattaagattgggtacacggagcgagatgtggagactcgaattcgtgagcaaacccatacggcagctattaaaactgaaattttatgggatcatttagctgaatatgtagatggaccagataaaggcctcaattttaaagaccatgattttcacggtttcctaaagtttcatgatatagaacgtagaccgaaaacagagtggttttatttcaatggtacaccggagaaatcggaaggtttatttaacaagtttattcgtcatgatgtatccggttatcaaccagggaaaagtaatgaatatgcgttacgtcgggagcaagacgaagctgttacgaaaacagcggcttatttcactagtcatgaaaatagcgaatttctatggaatgcaaaacctcggtttggtaaaacattatcagcttatgatttagttaaacgattaggtgtaacaaatgttttagtgcttaccaatcgtccagctgttgcgaattcatggtatgacgattttgatcagtttattgcgggtaatacagaatataaatttattagcagtaccgattctttaaaagacagaccatctatgagtcgagaacaatttattgaatatctcaatgaacatgatgcggcaaaacaaattgctttcatcagcttacaagatttaaaagggtctaaatattttggtggagaatacgataaattaaaatgggtggccgatttacattgggatttagttatcatagatgaagctcatgaagcagtagatacacgtaaatccgattttgcatttagcaatatacatagacgttggacccttcatttgtcgggtacaccatttaaatcaatcgccaaaggtcaatttagtgatgaacagatttataattggtcatatgcagatgaacaacaagccaagaaaaattgggatagcacgtgtgaaagtgagagtccatacgaagcattacctcaattgaatatgtttacctatcaaatgtctaagatggttttagatgtcattaataatggtgtaactgttgatggtgaaaactatgactatgcatttgatttgaatgagttctttgctactaatgagagtggtgaatttgttcataaagaagcagttgttgcgtggcttgatactttaacacataatgaaaaatatccattctctacaaaagatctacgtaatgaattaaagcatacattctggattttagatcgtgtaaattcagcgaaggcacttaagaagttactagaaaatcatcctacttttgaaaattatggaattgtattagctgcaggatcaggtaatgcttatgaacataatagtgatgagggaactgagaatctacgttctctagcggctgttcgtaaagctatagcagatcatgagaaaacaattacgctttcagtaggacaattaacaacaggtgtaaccgtacctgaatggactggtgtcattatgctatgtaatatgaagtcaccagctcagtatatgcaggctgcttttagagcacaaaatccatattcttggacagaaaaaggtcaacactatagaaaagaacgggcttatgtatttgattttgcaccagaacgtacactgattatttatgataagtttgctaatgatttatctatggcgactgctaatgggcatggtacgactgatgaaagaaaagagaatatcggtgaattattaaacttcttccctgttatagctgaggactcttctggtcgaatgatagaaattgatgcggctcaggtaatgacgattcctaagcaaattaaggcccaagaagttgttaaacgtggctttatgtctaatcttctatttgataatattgctggtatttttagagcgactcaaactgttttagatattctaagtgagttgcctgaagcatctcaaggtaaagttgttatgggaaacgatgacatagatattgttgatgtcgatttagatgatgatgataatccaattgtttcagatgaaatcgttattaataaacaagaggctttatttggagataaattacgaagttcaattgcaaatattgaaaatacaatacgtaatgaagatttaaaaccgacattggaggatatgttatctcgtgtgactgcacctgttattacaccaattgttcaggaaatgcaagaaacgtatggtcttaaaaatcgagcagcacaacgaattgaaaaagatattaaagatgctattaagacggtagccgaagaaaatgataaggcacaaaatgttgctattgcacataaagaagctgaatataaagagaaaattgaagctgctacatcagatgaggaaaagctagcgattgaaaccgaacgagaagaagcaattagtgctgtaaaagtagaatataaagataaatttacaaaagatattagtacaacattacatgaattgcctaaacaaatcattaaacaacaggaagtagaagttttacaaacccgaatgaatagtgatgaagaaaaaattcgtggtcatctacgtggctttgctagaacaattccaagtttccttatggcatatggtgatgcgcagctcacactagacaattttgatacctatgtagatgaagatgttttctatgaagttactggaatcacattagatcaatttagatacttacgggatggtggaaatggagacggatttgatggtcatttgtttgatgcgtcgacatttaatgaagccatacttgaattcttacgtaaaaaatcagaacttgctaattactttgaagataatcaagaagatatctttgattacattcccccacaacaaacaaatcaaatctttacacctaaaaaagtagtaaaacgaatggttgatgaattagaaaaagaaaatcctaatatttttgctgattcaactaaaacctatattgatctatatatgaagtctggattatatattgcggaattgattaaacgtttatataacaatgaatctatgaaacaacaatttccagatgataaagaccgcttgaaacatattcttgagaatcaagtgtatggatttgcaccatcggctattatctatcggattgctataaactttatctttggtccaattggggatgatgtaagtagaaagaattttgtgcaggaagatacaataccttatgctaaagatgggaaaatacaagatttagtagatatgtattggaggaactaaatgaaattttcttcaattagaatcaaaaattttcgtaattttgaagacattaatatcaaattatctaataaaaatgtattttttggattaaatgatgttggaaaaacaaattttctgtatgcattaagatttctttttgatcgaaatattagaaagaatggctttatagatagtgatttttttcaaaaaaatattaaaaatgaaattgaaattgttgttgaagttgatatatcagatacagataatgatgaatctaaacttattcgatcaatagtgaaaggtgcattacgtagtggcgataattcattatatataaaattaaagtctagttataattctcagctccaatatggagaaccacaattaatgtgggctggaaatgaaactaattatgagagtataaagcagattggttcattcactgatttagataaaatttttaatgtaatatatatagatgcatatgttaatttaaaagaattatttagtcgtagtttacgttatatattacctgatgcttcagaagatgattatgatattcaaaaattaatagacgaagatatcagatcacttaatagtcatatttcagatctttctaatgttaaaagtattgaagaagaattaactcctatatttaattcatatcaagggaaggaacataaggtttctttaaagtctgaagtttcagttaacggatattattcaaatcttaccccatatataggtccagatagcgaggagctatatcctactgctggagagggccggcgtaaactacttgcatatgcattatataaattgctaatgcgaaaagatgaggggaaaaagattaatttatttcttttagaagaaccagagaatcatttacataagggaatgcaactatcgttatctaatgtaatttttaatgatgatgcttatgaatatctttttgttacaacccatagtccttttatactttatgaaatgaataatgtaaatttggttagaatttatagtttaggtaatattaatagcaaaagttatatatataaagttccatatgactttgaaaagtccagaaagcttttaaatagttttttagctgaggctatatttgccaatagggtactattagttgaaggaccttcagaggcattacttttcaataaagttttattaagtgttaagccaaattatgaggcgttaggactatatattttttcagttcgagggatatattttagtaaatttattgacgtcttagagccattaggaatcacatgtattgtcaaaactgataatgatattaatgcaataccaaaaaagaaaaatcaatttctaccagctggatttaagcgatgtaataaattatttggacaaactcttttacctgaggagaaattatcttgtaaaggtatcaaaaagcaaagagaaatatataataataatatagctattataaggaaaatgaatgaatcaaatatatttatatctgaggttgatttagaacatgatttacaatctactttaaaacctaaacggtttaaagaattagtaggtcatgaacatccagtcaaacatttgcaagataaaaaacaaatttatatggtggagtttattaatagattagaagaggccgattgtagtgagattttaaattcatcattgttttcatgtttaaaggcattagtaaatgaatgagcaaaagtggacagaagaacaaaggaaaattataaaagataaaaataatttaatagtatcagctagtgcaggtacaggtaaaacttttgttattacacaaaagattgaatatgaaatccagttaaataaatcatttcaaaaaatagctgcattaacatttacaaataaggctgcggatgaacttgatagtcggttaaaaagaaataatgaaggaaattttataggaacaattcataactttgttcttcatgaaattattaatccattttttaaagatgtatatgatataaattatgaaggaaatttttcgtatagcaccaaacttaaattctctacatttgaggatggaataaaatatatggaatatggtgaagttggagagtattatgatactaaaaagtcttatatatttgacttaggattaaaaattattagagactcaagggcatgtcaattatttttgcaagcaaagtattataaaatttttatcgatgagtatcaggattgtgatattagcatgaataagtttttcttatatatattagaaaaactgcatatacctttggttattgttggagatgaaaagcaatcgatatatagttggagaggtgctgatccttcattatttaaatcactcctaaattcaaaaaaatttaggaaatatcatttgacagtaaattttaggtgtggtatttcaatacagaattatgcaaatttaatatttggatataaaactaatccatataaagatactaatgaccgtaatgtactgtttatagtcacagacaaatccaatgattctatattacatgttttaagttattgtgaaaaagaatcttctttggctatattaacacgtagtaataatgaggttaaaagtataggtataattcttaataaaaatgatatagattgtgctataattcaaaagtctccagttgaggctattcaaaataaggatagctatatatatgtattaattgctaaatatcttattgttaaagactattcagagtatgattttgctgaagatattgatttaaagaatagatataaggatatatcaattgaagagttgagaagtcgtttactaaaattagttaaagaagataatcaaaaccataagcatagtgtttctttaatactagatttatttaaattaaacttaaatgaagagttatatatgaagtttgaggaaactattaataatcatatatttcattatggttttaatattaaacattataaaaatgctgttatgacaattcatgctgctaaaggcttggagtatgatcaagttatattgtttgcagatgattataattttgaaagcccagaaaatcgagaattacattatgttgctgctacaagagctaagtcaaaattgattattattgctcatcatgactctaatagtaataaattctggaagtatttaataagcaggtctgaatcagagagtattaaattagataagataataaaattggttaaattgaaacaataaagaagtatgtatgaaagttatatctttaccttttgcatggtattaagtcgaatgtttctgataatacatataagatatataatacaaatggtcggaaacaagaatctatggttatattgccccatgatagcaataatagttttaaatttactgccccctgattgtattttagagacagtataagcttgaagacagtaagaatgatacaatctagattttagaaagaggttcatcacatcacctttgtgatagtaggaacctcttttgttatcattttattactacataagtacattagaatatacaaaatatagttagtgtgtattgaggaaatcttatgtttagaaaatctttgttattcggtggtctgattgctgtgttgtgtttgagtggttgcagcaatgctaatgagttgcctgggtataatgcaaaagttaagcattctagtgctgatttttataagaatgatttgatggatagtattcttaatgaacgaatctataatgctactagtgttgcggaggttagtgatgcggctagattactatatcgtgttgatgagatgaatgctgagcagcgtagaaatttaaattattctatgcggcgtgcccaatataatgctgtaaccgaagtccatatgcatactgataagggcgggctttcctatacactgccgtttccagctttcaaaggtggcacacaatctgcccctattccgaatgtaaaagatactaatacattggtgtatacatttaaccatccttttatttatactagtttagttgtggataatcatccgtatgagcaaagtgctcagtatttgggcaaaccctataatgaattgaagcaagactatgtacgtactgcattgcaggaacaatggtcacatatgaatcaagatatgtttgatatatccagtattgatggtagtactttcaaaggggaaagggttattaatggccgttggagtaccatgaaaactaaaggcgatcctacctttgtggcaaatgatatttcttttgccttaaataatgagcctgatacgcaatatgtacttaccttgatggttagagaagatggcgagcgcggtattggtaaacgaggcatcgaagatattatcgctaattacattgtgcctaatattacttcattagaacggttaaataaggatagtcattttgaaagctttaataactataattatcgggtattaaatgatgccgttgaggaagcatccggtaatgagcatattaaaatatataaggatcctacaggtatttcgcagatgatagaagtatatcctgttgagcataagggggaaatctgggctaatcttgttgacattgtcacaatctctgaagcacagttaaaaactagaaagaatatgcgtagtggtagccatacgtatatatggaatgatggtgttcctggcgtgctggtaacatttgaatatgaagatggtactagtgaatggcgatttagcacgcaagatgcacataatctttatatacatacaatccattataaatatgatgcgaatcgaaagagtttgccagcactagcaggaatcgcctccgatgcgaagatttcaaacttgggtgatacatataagggcgaagtagattttttatgatataattgatatcaaagtgaggtataaatggtttcgacgccagacttcgcttctaatgtttataattgaagaaatggtctgacttcacagtcgggccttttttcatgcttaaatgtaggtgtcagctatgaaggtccctcttgccatacatttttaagactatagcaattattgtatttaatacaaataaacctgcaaagcacactaaagccatggaatagccatatcctgcttcgtgaaagtacgatacaatcatgggaccagcaatgccggctaagccccaagctgttaggatgcggccatgaatagtagagagttgacgtataccatagaggtttgcaagatatgctggcatacaggagaagcatccaccgtaacaggtgataatgaggagtattaaaatctggaatgttaatgcactattggtttgggacagtaaatagaaggcaatgatttccatgataaagaataatatataagtttgtgctcgtccaaggaaatcagagatagtggaccatacaatgcgaccaccaccattgaaaatgccaataataccgactagagaggctgcagctgctggtgtcatgccaatggtttcttgtgccattggggatgctagagataggagcccaataccgcaggtaatattaacaaagaagacccaccatagagcactgaattgccatgttttcatagcatcattagctagcataccgtgattatgtacgtacatggtagatttatcttgattagagcgtgtcggtccttttggcgtaggtgctttcaaataaagggaagaagcactcataactataagataggtgataccaaggataatgaaattatttactaagcccacatgagccacaaggtactgcataagagggcctgcaatgagggcggcaaatccgaatcccattatagctaatccggtagcaaatccaggacgatttggaaagtattttacgagcgtagaaactggtgttatgtagccgatgcctagtccaataccgccaatgataccgtagaatagatatagtaaggtaaggctatgtatgctaagtgcataagctgtaccgaatagacctgctacccaaaataccatggcgaggagaccgctttttttggaccaatcttctctgcaaaggatccaagaaaacctgcagatagaccaagcattagaatggctagtgaaaatgtccaggttgtttgtgataaggtaaatcccatatctaccatgatagggcgcgtgagcacgctccatgcatacacgctaccgatggatatgtgcagtccaatagctgcaagtgcgataagccaacgatttctcataaaaaaactcctttcatacacgtgagattatcaaaaattgataaagaagcatttgctatgagatggcaataaaaaaagaccatctgaacaaaagcttgcccagacggtcggctatcacacgatgtgtgctactgtgcatgtagtcaattctacgtatccgtcagcccagtaggaagatgaaataaatataccaattgataatatattttgtcggtgatataagtcactatgttactaaactattacagaatgctttaatttatatggatttgttatagggctatattatttataagtgttttttggggattcgtggtggttttatatgttttacaattacgatagatatagcaattgtaaaagctatcaaaaaggattcttttgcgaagctaatggcaatagtttcttgtcccattagcatataataaatggatcgataaaagctgagccctggtagtaaagggaataagctagtcattaggaaaactatagcagggcatttccgtttaacagccaatattcttgatgctatggcgatgataaaaccactgatgaatatggagagcataacattagactgtagtgaagataatgttaagaacaagaaccatgagatgaatcctaatattgtacaatcgataaaatgttgtttagctacacggaataagattgcaaatgctgtagtaccaataccagccattatactacgcataaacatagaggttaaggaattagtatctaaattagaggtataaagaggaatcatttgtgtgttgaagagtagtgattgtactactgcgacccctacagccattgaaatacaggtaagtaacgcgcccatcataagggttattcctgtattatagttattctggctatactctctaatagcattgacgaaaggaactccgggaacaatgtcaatcatggctcctagtaatataactgataggttggagcctaattcaaagtggataaagagattacccaataaggctattagaatactacctaaaatggtaatcaatacatcagagctaagtatgcgtttaatcgtacacatatagacgcctaatattaagcctataatacctgcaattatagagtctgttatagaactaccaattgcatagctaaagcccgaagctcctaacgtataagctactaatctccaaaaaaaagaatagtctgacatggtatcaatttgattaagttcactttcaatctcctcaatagtaatatttttttgtgtgatacgtcgggagagagcattaacagattcaattttgctgaggttaatatcgacttcaggaacgttacaaatacgagtaatttcagttccatcagctttcttagcagttgcaaaaatacctctattggatacgtaggcttctaaatctttaaaattcatagctcgtgctatgtagttcatagtatcctctgtacgactgatttcggcgccactgctaagtagtatttttccagcttttagtataatttctaattccacacctgtcattatttcctcgttgttcattttacttcattgttatttatattggactttttgataggtctatctttagaagattcagttgattttgattcttcctgttgttcttgtagaatattgatattttgatgtataacttcttcgtctattgagagatgctcttctacatagtcttttagctcttgaactgtttccgtatttgaaagtatttcttttgcttcattatgaatatcttctttaagagattttgtatctgcttgactaatatcacctaatgtatggaatagttcacgttctttttctgaaagatttttgtgaggactatgtttttttaatgataaatggagcatctttcttcggaagagtttttccataatgatatctttacgatcacggagccagccataaataagaataattaggagtaatagtcccatataaccgagaattgggtagaggatactaatcaaatctttaaaaccaaagaaactacatatatatcctatgattactacagaaataataacaattctcattctttttgtgctgccgttggcaaaacgtctagcaatagaataaaaaagagagaatgctgtattaaaaataagtgaaaagactgtgattgcatatatatatgctagccaaggatgaatttgattggcaatagcaagaatcggcaaatctgcatcttttactgtatctagatttgcaaaaatagagatagcagctataaaaacaactaatccgactaataggccaccacgagtgccacctttttctgcaataccaatacgaacaacagaaccacctaaaataaaggccatagaaacagctgtcatagcacatagagaataataattaatgacagaaaaccatacattgcttgtggctggtttgattgtgtgggctatagcctctaatgtagtccaatcatgacttttaccaataaaagagtagcctgtaatgatgaatatcataacaatcatgataggagtaaaaacacctagaacactggttattttgtcaaagttcataaatgatacggttatgattaaaagtgagcaaattaatccaccaagccaaaaagggaatccaaattgttgttctaagtttgagcctgcgccagcaatcataacaaatcccataataaagctaccagagattagtacaaaatcaagtattcttgtaataataggatgggaaatctgtgtaaaaacttcttcatgattgtctgcacgatagtagctccccaaagaaagcatgattttaccaaatgcggcatttaatagacctagtaatagaacaccaataagacctatttggccaaaacttataaaatattgtagaagatcttgtccactcgagagtcctgcacctacaataacacctatgtaggcaaatgcaattttccatgattgttgcattatataattctcctttcaaatacataacttaataatctaatattatatcatactaatgattcaattgatggaaatcttactgccaatttctataaagttagctaagaatggacccatttataggtcttaagttcaatatagcgatgtcaaacgtagaaatttaaactattctatatctagagcccaatataatgctgtaaccgaggtacatatgcatactcctgaaggggggggcttatacattgccatttacagctttcaaaagagagaatattataaatggtcgttggagcactatgaaaacaaaggaaaaaccaagttttgtggccaatgatatttcttttgctttgccgaatgagcctaatacacaatatgtaattacgttattagttagagaagatggtgaacgagggattattgcatagtattatttcagatgctaagattgcaaacttaggagatacctataagggtgaagtagatttgccatgatacaataatagtaatatgaaatgtactaagtcccaatgaagttgatgcggttcgtcataaactagattatcaagaggactatgagcgggattatccttttaagtaatgtgtatatttgtttcgtgtgttgaggtgtgaatcctatggctacgtggtctggaatacggcataagttagaaacagaatatcttgctatcagcttgcgaggacatattcaatattttgttaccacttatagtaaatcgcctgatcatgaggggcgggctgctatacgatataatggtaaggaaattataaaaggcaattattggaatcaatatgtgaaggcccatctgtttcctaaagatgatacctatgaacgaagaatgcatgaaggtttgtaaacaaaacacggaaggaaattgttcaattcccttccgtgcttagatatgatataatttatatcaaagtgaggcataaatggtttggtcgccagctctcgcttctcgataatgaatttgaagaaacggtctgacttctctgtcgggccttttttcatgccacggttagaaagctagtttgaaactagaagtcaatcattttgcagccatgataatggtcgctacaagtatgccaaaggaaatcattaaagatagcactttgtatgtactcatattgaacaccgccaatcctcgagttgattagcaaagactggacccatttagaggcctcaagttcaatataatgttgtgaataataaaagtaaatagattagaggttcctaatagtcacctaggtgactattaggaaccttttttacttgacttttttaatttatataactcatatgttacaattaataatatagtagtcgtgttgtaggagaggcctatgttctatttagttattgccgtcattgtcattgcacttattgcaaaatctagatcatcgaataatcaaacagatagtgatgcggatatagagaaacagaatcgcatattagacgaagttaatcgtacatacggaaatattgaatcgtatgaaccacaattagaaccttcagatatagaaggaatatattttaatgagttccgtgaatatgttaatgctgaatgtcgtgtgttgactccagcagagattgatgaaatccggtataaagatgattatagagaggatattgaacaggattttcctttaaagtagcagtatgtatgtattattatgatttggagtaaacttttactaaacgcaagaattttatgttgtttgtatatactataaatggttataaatgaaaacacggaaagaaattgtttgattcctttccgtgcttagatatgatataatttatatcaaagtgaggcataaatggtttcgacgccagacttcgcttctaataattgaaattgaagaaacggtctgacttctttgtcgggccttttttcatgccacgattagaaagctagcttttacctagaggtcaatcactttgcagccatgataatggtcgctacaagtatgccaaaggaaatcattaatgatagcactttgtatgtactcatattgatcaccgccaatcctcgagttgattagcaaagactggacccatttagaggcctcaagttcaatataacgatgtcaagtgtaaaagtaaatagattagaggttcctaatagtcacctaggtgaccaataggaaccttttttgtttttataaaatttattgaattgtgttacaatacagttaatattagtgtgttatggagagaaatatatgttaaaacgttatattatcttgttcagcttaggattatgttttgcgacaccagtgctttcacaagcaattgatacaacatcaatgatacgtgttacgaatgagcatagtggtcaacatgatgctgcgttagatacttttacagaaacaaaattcttcggaccatatcaattccgcgtattaaaggatgctattgaaacgaaaggcgaaaccaaggatattgatggtagagtgtttagaacctctgatggggtatttatgcatgttaaggcaagatctattgatggtaatagtatgtctttagataatgagattaaaaatcttgttaaagagagaacgattcctgaacctactgttaagatggtattgcccattaaggatagtgtaatagaggttaataatgatggtgtgcgcagtttactcgctgaatttatgtatggctggccattaaagaataggacggacatggtattcgttactgattatgaaggaactagatactattataaattgcagttctatagagatagattgccaaacggtgttcgcattgagcaattgcgacaaatgattatggatgcgcaatttagctataaataaattaaaggtacatatgtaatgaaaaaaggtctatatattacagctcagtaatatatagacctttaattgtacgccgaataggcatgactaaacccccagttaaactgggggtcggtaaaaaattcttagagaaaaggaaagaacctcctagtggtaaaatgaagttggtctggcaaccacaacatttcaacataggaggttcaatgtcaatgaatgacgtaaaaagcttatcacatagtaaatggagatgtaaatatcatattgtttttgcaccaaagtatagaagacaaataatttatggtcggataaaagctgatgtaggtaaaattttaagagatttatgtaatagaaaaaatgtagagattatagaggcagaatgctgtccagatcatattcatatgttagtaactattccaccacatttaagtgtatcaagttttatgggatatttaaaaagcaaaagtagcctcatgatattcgataaacacgcaaatttaaaatataagtatggaaatagacatttctggtgtagaggatattatgtggatacagtgggaagatacgaaggagcgataaaagagtatattcgcaatcaactacaagaagatatagcacaagatacattaaactttaaagaatataccgacccgtttacgggtgagccggtaaaataggcaaaataaaagcccccgagtagggggcagccagtggtaatagagtggttgtcagatcattcaaagccctctttagagggctaccactagagaaagacccttatagggtcagagcaaaccacccgttctacgggtggttatgattgtattatctagttttccaactattataggatgcttttacccatagggaatacagttttgccaaataccttgtttacaagtacggcaccagaaccgtagaagcccaagagggagatgaataattcagaccatgctgcaagggcgaagaaacctgttttgccacctaagaataggtctgttgcaagaccgaagaataggaagcagattaatagcataatcgcgaatacaaccttgtttgttttcaaagatgcgatggtgccaaagatagagaagattaagaaacccacaaaggcgaatgccaattgtgttacatcgaaacctttttggatttcaggaccgaaggagcccatttggattaaccaaacgccagccatggcggaccagaataaaccgtatgcaccgaatacaacagatccgaaaggattatttttcttgaaatcaaaataactcgctatcaattgtgctaaagagcctaataaaacagcccaagggacaataacagatgttgttggaccagaccagccaacgcgggatgtagatactacaaaacatacaatcgcgagaccaagtaaaccaagacctgtcgggtccgcaacattttcgctcatttcaactcgtttaatttccttttccatgtgttcctcatttctcaatcaactaactacaactataggtgccatgaaagcactgcctcataaatgtaacatacatcacacttttgaatcaatactataggtaatagtaacaatgcttaaaatgcataattaaataagtgagtatttacaaggatagttataaatcgtagccgattttattagtttaattcctctaaaaattgggtattgcatatggatttaacataattcttgaccattggagaaatgtatgcgcacagtagattttggttcagttacgaaactcgagggtcttcttttatgatatactacatataaagtatgtaggaggttatatggtttttcttacttcattacaaagcatcatgcctatcgtcttgctcatatctcttggatatttcctaaaagggcggggcatgtttaatgatacatttagctcaaatctatcgaggctcatcatgtccgtcattttgccggtcggcgtatttatgtccgtgctacacaatgtgcaaacgtcggatttatgggacttgcggtatggattacttgtggtgatgatgacctatgtagtatcgtacatcatagcgtttattatgatgaaaattgtacatgtcccacggggacgccgcggtatttttatcaatatggtagttaacgataattgtttatttattggactacctgtacagattgcattgtttgggcctgatgcattaccgtttttcttgctgtattatattggtaataccatatctgtatggatgtttggtgtattccttattgaggctgatccgttgcctacgaatggtgctagccatggtgaaagcttccgcaccttggtacgcaagttttcttggaaaaaattgttgccgcctcctttactaggatttttcttggcactggtatttttgtatgctcagattccattgcctacggtattacataatacgttgaactatatagggaatatggtaacaccattatccttgctatatattggtatcgtattacatgatgcgggccttaaaagcatgcgtttaaataaggattccatcggtggtatcattggccgttttgccgtagccccatttattatgttctgcgttatctatgctaccaaatacctcatgggcattacattagattccgttgcggtcgtcacattcatcgttcaatccgcaggaccggtaatcgccgtattgccaatcgtagcgaatgaagcaggttctgatttaccatttgccacaggactcgtaaccattagctccgtattattcgtattcgttataccagttattatggaaatattaacgatatttggtataggaatgtaaatctatacaatataaaacgactagcattatatacatacgtatatggtgctagtcgttttttatgccttgaatttataatctaagtgcaactaaaaaagattcatggctttctgataaaatagtgtttgcaaagacatctaaaaatcaggaggagccatgaatcattatactcattttacactaaaagagcgcgaaattctaaaacattttattgatataggaaaaaatcaaacagaaatttcaattttacttggaaaaaataaatcgtctatatcaagagaaatcaaaagaaatagtcaaaatggcgagtacataccttgtgaagcccatgacagatataaaaatagacgctttaattgtaaaccaagaaaaaagctagataatccaagtctatatgaatgtgtaaagaatttatttttgagacatcaatggtctccggaacagatctcctctcgattgaaatttgaaaattcaagcttcactattagttacaatacaatttacagggaaatatataatggtcgttttgatgaaaaagaattatcacatggaaatagaggagttgttcgcaaactacgacatcgtggtaaaagtcgtcatacaaaaaattatgaagaaagacgtggaaaaattcaaattagtaatttaattacagatagaccagctcctgcaaataatcgagaacgattaggtgattgggaggctgatacacttatggggcagactggtaaggcttgcttagtaacattaactgatcgaaaaagtaggtatctgctatgtaaaaaaattgcaaaaaagaatgcatttttagtcaaacaagcgatgattaagcttttaaaaaatcaacctctagaaacaataactccagatagagggaaagagttttctaaacatgcagaaattagtcaggagttgaatttagtagaattttattttccatttccacatcatccttggcaaagaggaacaaacgaaaacaccaatggattgcttagagaatatttcccgaaaactgtggatattaatcaatcagatagctatgttgaagcaaaaatgaaagaaataaatcttaggccgcgcaaatgcttaaattggaaaactccatacgaggtttatcattcagtagagttgcatttgacttgacaattcaaggcattaaactattcgataattattatgatatcttatacattaagcgcttcgataatcgttacgatatcttctgcctttcgagcaatgtgtttgacgcctaaatctttatgtaattgttcgtctctaaagccccatgtaacgccgatgcatagtaggctagagtttttggctgtcgctacatctacttccgagtcgccgatgtagatggattcactttgtgtggaacctaattcttttaatgcttgtaataccatgtctggtgctggtttacgttgtaatccagggcgttcgccaatagctactggtaaacgatcaccaaagtattccttatttaatggagtaataccttcttggattttattagaaacaatggcgagtttatatcctttagcacgtaatgtgtctaatacatcaagcatgccaggatatggtgcggtgtaatcttgtaaatgttcgccgtagtatgctttaaattcgtcgagataggtgttgaactgagcttctgaaatggatgtaggtagcgattgacgcatcaaatgagctacgccattgccaagggctgctttcacctcaggaaccgaccgttctggcaaatcatgagcgcgcaatacataattcaccgcattgcgtaaatctgttaacgtatctagcaatgtgccgtcacaatcgaatacgatagttgtatatttcatggggacctccaaaatctatataatcttattccattatatgacatgaaccgagaattttaaattagtctatgatacaattagtatactagttgaaaatatttggaggattagtatgactgaaatacaatctttattattgatgaaagccacgttagaatccgcaaatcttcatggtgttgaagccatgctcgacgatgattgcgaatatgtttctacgggacgaggcattattgctcgtaataaacgtgaaagcttagaattcttaacggccatggttgattccatccaatctgaccatgtacctgttatctgtcgtgtgatgcatattacagaggtttacgaagaaggcgctttatttcatgagggccgtcacggtttgaccgttgcctatgaagaaggcgaccaatacgcgtatatattgtttgttgatatcaatgaagatggccgtattgaccgtatcgtttctagccaagaaaattatgcgtttgaatacgatgatcttcgtttatccttagatgaaacaccatatcgtttcccaattgtgccacacactgtgaaagactggattgcggccctcagcatatggcttgaaactgataattttgatatcgatgatttttaccaattcatcgatgaaggtaccaaggtagtgttccaaaaaggcgatgcagaatctattacactagaaaatggcctcgatgtagaggactactttgatcaacttatgaatcagaattttgctgctgtaccacatatcatccgtgatgaagaggataatcttattttagtctatggccctatgagccttatcgtgagccttaacgaacatggcgcattagctgttattagtatatacattgatacgcgcgacgaagaagaatccattgatgaatacggttatatcgaagaagatttgaccgaacctgtagaagaagaaccttttacggattattgatcggtacatcatacatgtccataaaaattagaacaggcctgtactaatttttgagtgaccttatataggtgtgttcagaaatagaacaggcctgtactaatttttcgggaaccttatataggtatgttcagaaatagaacaggcctgtactaatttcacggagcccctatataggtatgttgagaaatagaacaggactgtactaatttttcgggaaccttatataggtatgttgagaaatagaacaggcctgtactaatttttcggggaccttatataggtatgttcagaaatagaacaggcctgtactaatttttgggagaccttatataggtgtgtttagaaatagaacaggcctgtactaattttacggaggccttatataggtgtgcttagagatagaacaggcctgttctaattttaaagaggcaggagcgagctcctgcctcttttgtatacaaaaatgtaattagatatcttctttttctttgattataccagcttttttcttgcgccagtaccaaatgtagagcggaagaatgacgatacagccacctagaccccaaagtaattggtttgtttgggcttggcctagcatccaaagggatgtagcaatggcgatgattggaactgtgtaaccaccagggattgtgtaggaccgttctttatctgcccatttacgacggaatataatgactgctaaacatgttggtaggtactgtgtgaaacgggataccgcactaatagcagcaagggttgtaaatgaaccggaccaggcgagtagtacgctggcaatagcggtgacgatcgctgctacatatggtgcattgtagcgattgcgtttagctaaggcacttggaagcatgccgtcttcggccatggatgttgcgatacgaggggcgtaataggcttcggcaaagttaataccgcccatggaaattaatgtgcctgccaatacaatatacatgccaattggacctacaattacattgaaagcatcttgtactggtgcttttgtgttagcaaggtcagatcctagaacaccaatagatacggaaagtatggccacatataggactgatacgagtagcatacacatgataatggcacgcggtaaattctttttaggattcttcatatcctctgcggcaatagcgataacctcaaaccctgtataggcaaagaagagaagaacggctgcttgcgcaaaggatccatctacataggtatcgtgtgggaatacaggtgtaaagttagcgccgttaataaagaatataccgatagcgataaatagggcgagaggtactaatttagagattgtaatcaagttattaacaaacttagatacgttaacaccaaatatgtttacgattgttaagcctacgattaatatgaaggaaatgacatcctttgcaaaatcgccacttaaggctggcactgctgcacctaatgctgtggcaaagccaacggccatggcggcccaagcaataacggttacaatccatttaaggacgcctacctcaaatccccaaaagtcacctaatgcatgtttggcatatagataaggaccaccattacgtgtaaataggctggccgcttcggcaaagcataaggcaatacatcctgcaatgaccgcatcaaataaaaggacccctaaactggctgacccaataatggcataggccttattaggtaacaagaaaatcccagtaccaacgataccattgattccaaggagtacaatactccaaaatccaaatttacttttcttatccattagttgacctccttagtcgcatctacgaaggctttaaataatgtttttgcatgtacatctttcacatgcatcatttctggatggaattgagttgctacaaaccatggacgactcgtatcttctaatgcctctactgtaccgtccttggcgcgacctgtaacaactaggctttcaccaatatttcgacacgtttgatgatgatgagaatttgtaatccatgtggttgtgccgatgattttcgctaatttagaatcaggttcaatttctaccgtatgcgtaggtaatgcaggcgtttgattttggctgtgcttaatcgtgcaattttcatcatatggcaaatcttggtacaaggaaccaccacgataaacattcacgatttggcaaccgcggcagatggcgaatacaggaatatttcgcgcctccgctgcagctagtaaggcaaaatcgaattgatcgcgctcagggaacacatcgccgatgcctcgcaatggttcttcgccataattgagcggatacacatcatgaccacctgtaaggagtaggccatcaacaatattgatggtttcctttgcttgctctaaattttctgtaaaaggaataataatagggatgccgcctgcttcctcaatggaacggacgtaatcttgattgacatacgaacggattaaatcgacataagcgccactgttatcgcgtagcgtattgccggaaattccgattaatggttttttcataacatcacctcaatgtgtaaaatactgtacattaagtacaatataattataattcattttcctaaaatatactatagcatattacgcaagtaggaattgcatttgtgtaaatatagctaatactggatgattctaaaataaatttatagaaaattgataaaaaattaataattaggtataatgagtcttagcgtgtagagtatgaattgaggagaaaatatatgaactggaaacgtgtaatagcattaggtttacttggattaacgtttggcatggggcagtcctatgcgatagatgtaaatattcctggcgccgatgcatccatacctgctgatgaatatcaaaattatcgaaagaatacctcacaatctagacaaatggatcaaagaattgtagaaaaggttacaagagataatacatcgattcctaattatgaaatgtcgaaaacaccaatggatatatatcatacaagagaattaaatcatggtgttagatactctagtactgtgtttatcttaaaagaaaacggagcgaatataaaatttactattccccaatcaagcattgtggctcaagctaagggaagtatgggtaagcataaagaattaatcagtgcaggtggagtaatgacctataatggggagtggtattatgagttaagaccacagcctaagggtgataattgggaagatacgaacattccatatagtaagctgaattctgatgctatgaaagaagtattttataaaaaatataatccaatagcaggtaataaaaaaattagtgaaaaggtgttaggtgctaatacttttacatatcccaccattgaaaaggctacatgggattcaatcgtatataagaatgatttggtagaaggaacaatcaattttactatgccaaaacagccgacggtttcttatcatattggatatatgcttccaaaaggagtcgttaaaaagataagttctaaaggtgatgatgcactagttaaagccactatgaatggtttgtcgaatattgtattgccatcggtaaaacctgctagtgatatattagaatatacctctgaagtacatagaggaccttttacgttcagaattttaaaaaatagtaaatctttaggtacaagagtcactaaaaatggtagccaagtcgaatattttaagtctggtaaaattaaagagtctatttccgtaagacctctttttaaacgagacgatccaaagaaacagaatatcatgtatcattctctaattggatttgttggtgcagatcaattaaatgaaggtaagcctattcaatttgctactgtatggaatgatgctttaccaggtgcttattatgaagttaagggcgaaaaggatactttgtttgtgatgactgtatttgatgatacgcatctttatactcactatatggtcaaacctcatgatgtgcatgtaagtaattttaaattacgtgatatcgttcaatatgtagattataagcataataaagaggattatggtagatttaaacttggtttaggcatgccaaagtttttaattgaacgaaatatatcggaacaattgaacaagaaaaaataaattattatagattgtgattctatatgattatattaagcgatgcatatatatcgcttagtaaaaagaggaccggctcaaatgagtcggtcctcttactatttgtatatgtaattatctaaagaatctaccaataagtggcatgctagcaccatcatttttgttaagcccttttaaaagaaccatgacgataacgtagagcaataagccttcgatacctgtgagtatgaagttaacccacattggtaagatatctgttaagtagtggtagctcaagaagatgagtacccccatgacaccggcactgaccacgtttttccatagaagggaaatatcgaggaagtagcctgtgtattttttgatgtaaatcaaattgagtaaggctgcaaagccgatgtcggctacggttgcccaagcagcaccaccgatgccgagccaaggaatggccgttaatgtccagttaaggataaccttgatgataagggaaatacccatgttgataactggaatgcgcggcttgttaaggccttgtaaaatccctgttgtaacttggtgtacaccgaggaagaagatggagaacgctgtgatttgcgttgctagttctgccttaggagcattgtaaatcaatgtaacggttggggcagcgagtacatataatagtaccgtaaatggtacggttgccataaatgttaagcgcatagaaccagcagtgcgttcgtaaataccttcatgatctcgcttagcaaaagcatgagagatggctggtacgatgctcgtagcaagggctgctgtaataatggtagccaagttgatgagcggtactgccatacctgtaagataaccgaacagttctgttacttcattcatcgggaaattagcgtctaataggcgacgtggtacgatgagcaaatcaagattggccgttaatggtaacatgatgctggctaaggaaatcggaatggacaacgataacagtcgcgataaaatttccttggccgattcgcgtggaccattgtagctttcaccagtactactagccttaggcaatttgtagtaatagtacaagagcacgaggaaggcaccaaaggctccgacgccagcacctaggctagcaccgccagctgcagcaggtaagccatatggcaataagatggccgctgcaccgagcatgatgataacgcgcaatagttgttctacgatttggctgaccgccgttggggtcatcatttcataaccttggatgtagccgcggaaacaggaaatccacgttacaaagaatactgccggagcaagtgcgatgattgagtagtaggcacggctttcagcaatgagaccgctagagataagccaatctgcgccaaagtacatggccaagctggcgataaagcccgtaatggtcagcattgtgaaagaaatattaaatactcgtttagcaccaccaaagtcgtgtaatgctaatcgttctgccgtcaaaatagagatggcaatcggcacacctgcgctcgaaatttgtaatagtaacaaatagataggaaaggccatctggtagatcccgatgccttccccgcccaagatacgggagagaagaatccagttgatactaccgatggctttcactacgaaaccggcaatggttaagattaaggttccttttacaaatccactagccatagattatagtttgtgagaagaacctaatacatctttaattttgtgagctaccatgcctttaatagcgtcacgagcaggtcctaaatatttacgagggtcaaattcggatggattttgtgccaagtattcgcgtacagatgcagtcatagcaaggcgaaggtctgtatcgatgttgattttgcaaaccgccatttgcgctgctttgcgaagcatttcttcaggtacgccttgtgcgccagggatattgccaccaaattcgttacattttgctacgaattcaggcaatacggaggaagcaccatgcaatacgatagggaagttaggcaataatttaccaaccttttccaaacgttcaaagtcgaggtatggtgtacctttgaatttgtaagcaccgtggcttgtaccgatagcgatagccaaggaatcaacgcctgttaatgctacgaattcagcagcttgttctgggtctgtgaagcgagcatctgcatcggatacgttaacgtcatcttcgacgccagctaaacgaccaagttctgcttctactacaacgccgtgcgcatgagcgtattcaacaacttgttttgtaatttttacgttttcttcaaaatcatggtgagaagcgtcaatcataacagatgtaaaaccgccgtctacgcaatctttacagatttcaaaagaatcaccgtggtcaaggtgaagagcgattggtaaattgctatcttccaatgctgcttctactagttttacaagataaatatgtttagcatatttgcgagcacctgcagatacttgcaaaataagaggggattgttcctcttttgctgcatcgacgataccttgtacgatttccatattgttaacgttaaaagcacctactgcgtagccgccttcataagcttttttgaacatttccgtagtcgttactaatggcatgttgtcctccttggctttatagccgattgtatgtattttgaaagtattgtcatcaacttatgatgatacatatctattcattgttagtatatcaagaaacgatataaagcaccacaattttataaggttttctagatgaatctgttagagacatagtaaatctttcatatccgttggcataggggcccgtagttctatatactcctgtgtcataggatgggtgaaagctaggtagccagcgtgcaatgcttgccgatgaatatgatctaaatgaccgccatataaatcatcaccagctaaaggacaacctaaatgggataggtgtacacgaatctgatgggttcggcccgtatggagtacacattgcacatgagtcagaacctgttgtgtgctcaaatttttattcatttgtacaggatgggaaacaatgtggcgtgccaataccgtcacatcagtacgagccggtttgccaattgatgtgcaacaccgttcgatgatgctacccggtttacgtccgatgggataattaatggttagcgattgacttggcatagtaccttcaacgatggcgtcgtagaccttttgaaattttgtgcgttgcttatcaaaggcatgctgcaccaccgatgtcttagcgatgatgacgatgcccgatgtgtccttatcgaggcgatggaccgggtgaaagtcatgagattgttcggtttcgtcataataatagagaacgccatttgccaatgttccatctcgcatcgttgacgtagggtgcataagaacaccagcagctttattaatggcgaggatatactcatcttcgtatacgatttccagatccattggggtccgtgaaaattcttgctctggtgctaatttcataagtagatgatcgccgccgtgaactaaggtatcccatgtagccggttgtccgttaatggtgatgatcccattattttttagacgccgtcgcatgcgctgtgaaatatgctgttgttttatgatgtgattcatagattgcgtgtgtacattagcatctacaatcaagtcgattatggttgctgttttcataggtcctattatagcaaaaaaataatggatgaagaatttttcataatttattgtatatataaaggttcgtatagtataatttatattaatatttgtttataaaatttttatatctagagtcctttgagtaataagaggagaggcctatgaaactcaacagaaaatctttattagtcgcatgtgtgttggcggctatgtctacgagtactttcgcagcatctagtacaacatctactagtagtacaacagtaacaaatcatgatacaccaacatctacaagtacgcgtgtaacacgtgaacaacatagtgcatccacatctactactaatatttctacgactgaaaaggtatctactaaatcaagtggtacaactgtatctgttggtgtagggcaattaggtgattatgtagccgtaccaattattggagccactcaaaaattagcaccagaagcatttaagtctctccaagcaaacattgatgaggctactgaaagtaatagtgcttttattaaactgggtcaattagctaaggttaagcaaaatggtaaatggggacttgtaggaactaatggtcaagttttgcttgatccacaatataaagagttggatccatcttatgctgaggacggaacatacttcgtaaagttaaagaaaactttagaacatattaaagtagatggtaccgttttatcaagtggtaaagatgccttagatgaacaggttaaacaaattattgatcatcatgatgagactgtaaacaagaatcaaaattcgttaaaccataaggaaacctatgcaagtgattcttatacggccgtttctgtaaaaggaaaatggggctttactgatgcatcaggtaatactgtaatcgcaccacaatttaaagaagtatatacgaaatttagtgaagatcgtgcttttgtaaaagatgctaaaggtaaaaatgtagcaattgatggcacaggtaagactgtatttgaagcaccatctaatgatattgacgcatatgatgatggattggcagaattccgacgccatataagcaagtttaatcttggaggcttgttgagtatggctgtaggaataacccttagtaatcatggaggaatctattatggtgatgcatggaaccctgtatatgatggtgtaaagcgcggttatattaatcgtgatggtaaaattgttatcgacagtaaaaatgatgcagtttggccaattactgcttacggtacacttgtgaaaaatcaaggtcttattgggttcgtaaatcgtgaaggtaattatattattcaaccaggtaattatgatttaggcgaatttagtgatattaatggattgttagtacttatcaataaagataataaaaaagcgggtgtatttgacgtggatacaggtaaacaagttattccgtttacctatgattctattagatttgtaagcctaactaatatggttgtcgtgagtggtgataatcaacagttaatcgatatgacaacaggaaatgtcattttgactacctccaaagatatggggataaacaaatttagtggaccatatacttgggtacataagacttctagtgattataagcttattgatgatagtggtaaagtattatttagtgataacacaatcacttctgcaatgcccgttaaacatggttttgctccggtaaaatctcaaggtaagtggggaattgtaaatctacgtggtgagtgggttgtacaaccacagtatgaggatattgagattttatagatagattgtattataataaaaatttatgtattggttatcctagtatattatgttgtttaacaataaatgaggaattcattaatttttcataatgtgctatactgtagttataaattggcttgtgaatttatttgcttttggaggaatatatgaaaacatctaaagcattattaaaatttttggttgtaggttgtcttagtgtttcttgtgcattaccactgactgcttcagcagaagatacaagtgcaccaagtgcgatgcaagaatctgtagttaagacagaattaccatctggagttaatcgtattcagttgttaaagagtggtgaaactacggcaactgtaaagacatcatctgttgctgctggacatgcgtatattcctaaagatacaaatattaatttagaattaatcgatcctattagttctaaaaaaagcaaagaaggaaatacctttagattaaagaccatagaaaatttactaattaatgatgtagttgttattccagcaaaccaagaggtattagggacaattacaaaagcaagaaaaaatggtatgcttggacgcaaaggtcgtttagagtttaaaattgatagcattaagactattaatggtgtaaatgttccattaactgcagaagttaaaggaaagggccattctgataatggagcagttgccgttgctgctgcagtaagtttggttggtggcttgttcatgaaagggactaatatttactatgaacctggccaaaaatttgtagctcttgtatctactgatacagatctaaatacaacagtggaagatttgcctaatgctatgaatccaagtaaacctactggtcaaaatattgttttaccaattaaataaaatataagtagtattaatacccgatagtgataaattttaaaatattgctattgggtattttagttgattatataaagataataggatgggaagataattattgtatctagattaatgaaaaatcatcataatctaattatttgaattcctagtaaatatagataatttacgatataattatatagatgtattccattcaatgaatacgtggatgatgatgaaaataatgcgtgaaccccatgcccaacgggttcaggtgtaggaggtataaaatggctaaagattgttcctttgacgttgtatccgaagtggatatgcaagaagtggataatgcggtaaaccaagcaaagaaagagattggtacgcgttatgatttccgcggttctaaagctgaaattagccttgacggtgataccattaaaatcatcggtgatgacgaatataaattgaacgctattatcgatgtattaaaaggcaaaatggttaaacgtaatgtagcggttaagaaccttgattatggtaaggttgagcctgctgctggtgccactgtacgccaagtgattactattaaaaaaggcattacaaaagaaaatgctaaagaagtagtaaaggcaatcaaaaatatgaagcttaaggtacaagcgtctatccaagaggatcaagtgcgcgtatctggcaaggataaggatgatttgcaagcggttattcaaatgttaaaacaattggatgtaccggttgaattgcaattcgttaacttccgttcctaattatataagcataagagatagggttagattgattcattgaatcgctaaccctatcggtgtaggaggcgctatgagagtagaggacatgaagggtggttatacgaccggttcatgtgctacggcaggcatgaaagcaggtctattggccctcttagaacacgatatggtggataaggttgtcattgagaatccgcaaggtcaattcattgaggtacctattaaatctgtggaaatcatatccgaaacagaggcaaaggcgactgtgatgaaggatggcggtgacgatccagatgtgacccatggcaatgatgtggaaacgacggtgacccttgatgacacaggcaagctacgttttcgagctggttttggtgtcggcacggttacgaaaccaggtcttgccatgccccctggacaaccggccattaatccgggccctagagcgatgatgaaactcgtatttgaagagttttgtacgcaaggtcaaggtgtgacggtaacagtaagcgttcctaatggtaaggtgttggctaagaagacattgaaccatacgctgggtatcgaaggtggtatatccattatcggtacaacgggtatcgttaagccgatgagtgaagaaggctttaagaattctcttgtgcctcaattaaaggtaatgaaagccaatggctgcgaaacggctgttctcgtccctggtagaattggtcaggacttagcggaacaagtgcttggtatccataagaaccaaatggctgaaaccagcaatttcatcggatttatgcttgaacaagccgtgcatattggctttaaacgaatcttgatcatcggtcatatcggtaagctcattaagcttgctagcggaagttttcatacccataatcgcatgagcgatggtcgcatggaaagtattgtggcctatgcagctcttgaaggagcatcccaagcggtgtgtgaagagttatttaattgccaaactacagaatctaccttccctatcttagagcgagaaggcctaactggtgtatatcaacgtgtagtagaccgcgcatctatgcgcagtgaacgatatattgccaatgaggctgaggtaggtattattattaccacattaaagggtgagattttggctatggataagcatgcaaaagaaataggagagctagaacattggcacataccttgtatatcgtaggcattggcccgggcaatcctgattatgtggtgcctaaaggccttaatttaattaaacatgctaccgttttggtaggtagtgaacgctccttggaggattttaaggaacccggacagattacgtatcctgtaacggggaaactaagttggttatccgaacaaatcgagcgtgaacttcacgaccatgatgttgtggttatggtcagcggtgatacgggctactatagcttgttaccgtatttgaaaaagaaatttcctaccacacgcattgacgtggtgccaggtattagttccatgacatttgcctttgcacgccttaacgaagtgtggcatgatgcggatttaatgagctttcacggacgccaaccagcgtctgaaagactcgtatatgaagcgggaaaaaagatggggttcttaacggatcctgaatataatccagcgcatattgcgcgtattttaatagatgcaggttggccaaaagaaacgagagctgcagcccttgagcgattgagttatgacgatgagaaaatcgtagactccacgctagaggttcttacagaactcgaaggatttggtcattctgtaatggtggtactaggatgagacatttttttggaattcctgatgaggaatttatacgcggtgacgtgccgatgacgaaatgcgagattcgcaaagccgttatgaatgaggcacgtatcgaagaagatagcatcgttcttgatgtgggggctggtacgggttcgatttctattgaagctgccttagcggcacctaaaggtcatgtatatgctattgaacgttttgataaaggcattgagttgattcatgaaaatatgaagaaattcaatgtaaataatatgactgttataaaatccaaagctccggagggtatggaagatttacctgagcttgatgcggttattatcggcggcagtgctggcggtatgactggcattatggatgaagcacaacggttgttaaaggtaggcggtcgccttgttgtaacggcggtaacgatggaaacgggctataccattttaaaagagttgaaaggtcgtcctttcacatacgaaggataccaaatgtccattagccgctatcgtaaggctggtccatatcatttgttggacccattgagtccaatttttattgtatctgcaacgcgtatcgcagaaggagagtaatatggttgacgtacatatcataggcgcaggccctggggatccagagcttattacgcgaaaaggctatcgtttagtacaagaagcggacgttgtcatctatgccggttccttggtaaaccctgctattttagaggcttgtaaaccaggttgtgaaattcataacagtgccactatgaaccttgatgaggtattggctgttatgaaagcatccgtagcagacggcaaaaaggttgttcgtttgcacaccggtgaccccgctatttatggtgccattcaagaacaaatggatgccttggctggcatgggtattacctatgaagtggtacctggcgtaagttcgttccttgctactgcagcagcattaaaacaagagtatacattgccaaatgtatctcaaaccgtaattattacgcgcatggaaggccgtacaccaatgcctccaaaggaaaaattgcgcatgttggcggctcatgaagcgaccatgtgtatcttccttagcgttcaaatgctagataaggtagtagctgaactcatcgaaggcggttatgataaaacaacacctgtagctatcgtagtgaaagcgtcttggccagaccaacgcatcatccgcggtacattggaaaccattgcggatatcgtggctgaagaaggcgtattacgtcaagctatgatcgttgttagtcatgtactagacagcgaatacgaattatctaagctttacgataagggctttgctcacatgtatcgtagtgctaaggcctagtgtgatgaaagaactagaatctgattcacctatgacaggagcaaagaagaatagaaccgctattctttctgtgtctgagcgtggtgcaaagctaggacaacgtattaagtctttggtagcacctcatgcggattgttatgaaaaggaaaaccgtccctctggtggtgaggctatctattttgattctctcaaacatcacatagggcagatttttaaggattatgaccaagtgttatgcattatggcactgggtatcgtagtgcgcatgattgcaccgtatattgaacataaatctaaggatcctgccatcgttgtaatggatgaggcaggtcatcatgttatcagtttgttatctggtcaccttgggggcgccaacgaatggacgcagtccatttcgctggccatcgatgcggacccggttattacaacggcgacggatgttaatggattgccagcgcctgacgtgttagcgcgtcacgagcatctgttggtcgacgattttcacacattagtggatgttaattccgctgttgtggctggtgaaagcgtcaactactacatcgatgaaaccttagtcgatgctaatcggttacgcgatgctgctgcattacatatcggtacgcatggcacggttcaggtggtagatgtatttacattgcctgagactgatggtgttcgtcgtgtagttataacagataaggtgattactgagtatccagagcaactcatcttacgtcctcgtacgtatacgatggggattggttgtcgccgagatacgccaaaggagctcatactggatgccattacacaatctctacagacgcataagctttcaccaaaaagcatagtcacagctgcatcggttattgtgaaacaagatgaagtgggtctattagaggccgtaaacgaattagggtgggctattcatttctacacacaagaagagatagcacccgttatagaagaacaggatttaaaagaatccacatttgtaaaaggaacaataggagtaggaaacgtatgcgagacaacagcattactagcggccaagagccaaatattaatacagcacaaaacggtgtatcccaaaacaacggtagccattgcacaggtaacatcaaagtaatcggcattggacctggggacgctgaatttatgacaccgcaagcacgggaagcgattttagcggcagatcgtgtagtcggttatttaacatatcttgatttgattaaagaccttatcgcaggtaaacaaacggtaggtacagcgatgatgcaagaagtggatcgttgccaacaagccgttgatttggctgtagaaggtcaccaagtagtagttgtatcctctggtgactccggcgtgtacggcatggctggccttgtattggaattggctaataaagtatcagcagacaaacgcccttccgtggatatcgttccaggtcttagtgctgtcaacgtagcagcatctgtattgggtgcacctttgatgcatgactttgccgttatttcccttagcgatttgatgacaccttgggatctaattaaaaaacgtgctgacctctgcgcacaaggggatatggttatttccttatataacccacgcagtaaaaaacgcgtaactcatttagatgaagtacgtgaaatcgttctaaaataccgcgaccctaaaacacctgtaggcatcgtgcaaaaagcaggtcgtccaggtcaacatatggtaatttctgatctagaaaacttcacaaaagaagaagtagatatgcaaacacttgttatcattggtaacagccaaacttatgttgaaaatggtcgtatgattacacctcgaggctataaattatgatttgggtcattgctggtaccttggatggtcgaaccttggcggtagatatccaagaacgaaccggtgaagaggttctcgtgacggtagtgagccaatatggggcggaattggctgctcatgaaggcattacagttcatacaggccgtcttgaccaagaggctatgcaacagttgattaaggagcataatgtgcgcctactcatcgatgcaagccatccgtatgcggctattgtgactgcaacggcacaagatgcagctaaggcggtgggcattccttttgttcggtttgaacgaaaagaggtaccattgccagactatgataagttgcatattgtcgtggatgaaacagaagcagctaatttagccggcaaattggcaaaggaaaataacaatcatgtatatttgactactggtagtaagacgatgcacatctttgctaaatctgaagcgttgcaagactgtgaagtatggacacgtattttgccaactgctgaggtgttgcaaatgatggaagacctcaatgtgagtcctaaacgtatcgttgccgtacaaggtccattttcttacgatatgaatcgtattatgttctacgatacaaaggcgagcgttgtggttatgaaaaactctggcctcgtaggtggtgctgatacgaaattacaggctgccatcgaccttggcatccacgttattgttatcgatcgtccacgggtgaaactagaatgccctgtggtatcatcgaatgatgaatttttcaaattatgggaggacactaatggattacgttaaaaatcctaaagccattgaagataaaagtatggaaatcatttacgattatgtaaaggatttaggtttaactgatgatgaagtacgcgttgtatctcgtacagttcacgcatctggtgacgttgaatatgctcaactcgtaaaaatgagccctgacgctgttcaaaaaggtatagaagcattagacaatggtgcagatatttacactgacgtagaaatggttcgcacaggtatttctaaaccggctcttaaacttcgtggtaatgaagtacattgcttaatcaaagatgaaaatgtagctaaaatggctaaagaattgggcgtaacacgttctatcgctgctatgcgcacatttggcaaacaattagaaggccaaatcgttgctatcggtaatgcaccaactgcattgtacgaagtattgcgccttgctcttgaagaaggtattaaaccagctcttatcatcggtattcctgtaggctttgttggcgctgctgaatctaaagattatttgatggaagtatccccagttccttatatcactgtaaaaggtaacaagggcggtagcccaattgcagcatccgtatgtaatgcattgctttacacagatgtaaaacgcaacgatatgctcttcgtagaaggcaaagaatctaaataataagtaacccgaatcgttgcatactgctggcgattcgggttttactgtatctattatgaggtttatatgtataatacgggtgctgatagtaccatgtattggtgaaaggagaggttactgtggactctctgaatgaacgaaaactatttcgtatatcagttattattgtcttggttattgctgtcatagctagcatgattatctcactgatttggggctccacaccggtgtcactatcggagatttggcacacattgtgggctagtgagctaacagatacagcatcgcaaatcatttggaatattaggttgcctcgtaatattgttgctgcattagttggtgcttgtttagctgtatcgggtgccattttacaggcggttatgaagaaccctttggcagatcctcaaatcgttggcgtttcctccggtgctggacttgccggtgttattatatttattcttttccctggctatgatcatattgtgcctctcgtcgcctttataggtgctatggctgcggcgttgatggtatatgctcttgcttggaagaatggtgtacgcccaagccgtatcatcttggctggtgttgcggtggctgcttttttaggctctggtatttctgcactacttgtattctatggagatcgtgtgcaaggagccttactttggatggtagggggcttggctgcacgcagttggcctcaagtagaggttctgttcccatacgcgttagtcggtcttatttttgcctgtttaggtgccaaacgtcttactattttaagtttaggtgatgaaacagcaaaggggctaggccttaaggtagaacaaacgcggtttattatgactgctgttgcggctctattagcagcaggtgccgttagtattgcgggcttaatcggtttcgtaggcctcgttataccgcatatgttacgacttatcatcggtaatgattatgcgtatttactccccggctctgcattattaggggcactcgtcctcgttgttagtgatacggtagggcgtgttatgtggagtccaattgaggtacctgttggcattatcatggcattctttggggcgccattcttcttatatctattgaggagggataactaatgaatacggctattgatgtaaaccagttatccgtcactctcggaaatcgtcatattttacatgatattaatgtatctgttcctgttggtaaaataacgactttaatcggacctaatggttgtggtaaaagtacactcttacggtctatgattggatatattcatagtccacgtgaatgtgtgactattttaggtaaaccattacagtcgtattcacaaaatgaattggcacgtcaaatggcgtttctgccacaggtgcctaatatgccaaaggatatgaccgtagaagaattggtatattgtggacgctatccataccaaatgtggtggaagaatacggccaaagaggaccgagaaatcgttgactatgcattaggaattacaaaaacgaatcatttacggaatcaattaattccatctttatctggtggtgaacggcaacgggtatggattgctatggccttagcacaacaacccaaattattagtgttagatgaaccaacaacatacttagatattaaccatcaactagaaatcatggaattgttaaaacgattaaacgatgaacaagggttaaccgtattgatggtactccatgaattgacgcaagccgtacaatattctcattatatggctattataaaagatggtcatttagtgacagctggagacacgaaagaaatcgtatcggatgaactatttagagatgtattctctgtagatgtacaaatcgatacctttgatgataaacaatatgtacgcgtaaaaggtttagttgagtagatagctagactaatagtgaaagagggcattcccgaaatggggaatgccctctttagtatgttaggatatgttaaaatgtaacatcaatgccatatgcttctttcactaaacgagccatagcctcaggtgtttgtagacctgggttaagtaggaatagtttagatggtaagtagatgacacggttgttttgtacagccgtaagattagcccatgcaggattatctgtcatagctttcttcatggcctttgtaatttcttcttctttacccatggtaacgacgaagataatatcagggttatcagcggttaatgtttcaagagaatacggtaccgttttatctttggttgtaccatctaggtgagatgttacaacatttgtcatacctaattctttgaccatagatgcagttaccgcttcgtcggtttcagctgtcacacctttaccggtagcacgcaatacggcaatacgtgcaggttgttggtttttaatggcatccttaaccttttgaatattactttcataggtggcaataacggatttagccttatcttgatggtttgttaactctccaaggaatgttagcattggcacattatccttgataccatcgtaattgaaaagtacggctggaatattgttagattgtaattgggattcatattttttatgttggttttccaaacccaataccacatctggttttaaacctaacaattgttccatattgatgttagccgtttgacctaatgcaggtaatgcttctaattctggagctagtttatctgttgtgctagctcgggaaattgcctttccatctactgcgtatagcatggacaatacagaatttgaaagaacggcgatgcgttgtggatcctttggtacagtataggtttcaccattaaaggtaagttccttcgtagtagcagaagagctggatgtggacttaccacacccagctattgctagtacgatcatgaccaaagcaagactacagagtagtagttttttcatgatgtactcctatgtacgttatataacgatactagttaaattgtagattgattatttttgtaatgcgtcccaagattcgttagcacgttcaacgaataagttacggatgttaggattttcacctaagccatggatgtaagtgtcaactttgaagccttctttttcaagaatggatttatgggattctggttctgcaccagccatgtcattatttgcatggtcgccagctaccatcatgaatggcatcaatgtaacgtgtttaataccatgtaatttcaattgagggataacttgttcaagatttggagtaccttctacagtgtaaataaatacatttttcataccaagagtatggatacggtcttgaattacagaatagtaagcattggaaggatctggagtaccatgagccatgataagaagaccgtcttctttgcctaatttagggaattgagattgaacagcttttaatgtttcaataacttggtcagtttggttttcttgacccatccagtacataagagatgtaccaagtgtcatttttttgaaattatctttgtacaaattatatactgctgcatcgtagttgtattccataccaggaattacatcaagggatgctaatgcaacgcgagtgtaaccgtcttttttaagttcagccaatgcttcttcaggagttgggtaagtaataccttctttttgttggatacgatcacgaataatatggcttgtgaaagctgtaattacttttgtgtttggatgagctgctttaatagcatctacagttgcatcgattgttttcgcacgagtatctttataagttgtaccaaagctcataacaaccatagcatctttgtttggcaagttttgtaaagcttcagtattgtgtgtacgaacaccgattgcagaagcttcttttaatgctggagtagcgtcttttacttcagaatttaattggtatgcagcgtgaccaagcacaggagcaccaaatgtcaatgcgaaagccgctaatgcagcagaaactgttaatgcacgtttttttacactaaacataagtgaatcacctcattaaacaacatcatctgactatgcagacataactatattatctataatcaatcgtagcaacctagagtatatatgtcaataaaccccatacctgtacacgtatagataatacgaccgttttttataaaaaatcataataaatgaggaataatcttatgttttataaaaatattcttattggttatgatggtataattataagtaattcgatatttatgataggatttatcattctgttttgttaaaatgattaattgtataagatgttaattatacttatagcgacatatagatttgtggttgctataaactcttaacaaatattatatattttataatagattggcatttacttgagattaattaagtgtttatagaaagtgtcttatatagaatgagtaagcatataaacatagataatgaaataagattgtttaaagataatatagaatctttgcgaataaccaatatttttaaaaatagacgcataaacataataactgcgttaatttactatacaaccataatttatatatatttacttacgttgagtgtagctttttttattaatccaatgccgtatgagtattttttttatggagtagagatgactaccaatatattatttttaatagtattggggtatcgatgtcaggattatggtattcatagatatgtaggtattatatttgttattatggttagttccttaattacgttctggcagggcggaaccttttttgttagtcccgataattttataatatctataactaaatcaggagtaagttcaatgcttaatctaaataaatcatacttctttatagttatgaatagaattatattattatttttattaattcctggaaataagataaatcgttatggagaacaaccaaagtctggattttgggacggaacatatttagttgttgatcctttgaacgtatcgattattaaaagtaaacttcgtaagttgtggctcgatttaattcgaagaaccgatgaaattaaggatataaataaaaagacgtctacaacggatgacttggaatttatggatgtcttacataatgtattcataaaggatgtattcaattttactggtcgttcttctagagatgaattgctgcttttcacagttttgttttctattctatctatggtatcgagttattttctaccatttattcctaaaattatgggacaaaatagtatagtgatagtaaatgaattgatagttgctattttgtgtattcctttttttagtttacttgttcgaagacttcatgatagtggtaatagtggtctttggattttctttcttatagtgcctgttgtgaacatatatgttttttatctaatttttgtaaaaccatcggtttaaaagaggtaagtccatgcaaggaatacataataaaatagcttttttgttgattaaataattttatgtaagagagaatatgaatggaacaaggacaaataataatcatcttcataatttttaattacctcatgattaaatatcgaaatagtaataacataaaacttgtggcctcagtagggaattatttgctcttaagtattgcattgtctgcgtattttggtattagtgatattattacacctattaattccgtattggttagtatactggcaatcttaggaatatataatttataccgcaaaaataagcgtggccttttatctccaatagaaaaaagaatgctctatgtaatttattcttttataatattgatcttaacatcagtggtcatcgttgttttgtttttattatttggagattatttgatttgagtgataatatttctcattgactttcatagattaatcttgtattattagtacatagtagttgataataattttcatttatgaaaattatttcatatatatgggtatatggaggtcacatatgaaaggtataattattgcatcctttggatcaatttataaagaagcagtggaaacatccattggcactatagagtctaaagttcgttccttatacagagatgtagaggtacaacgtgtatttttgtctgatgcattagtggaaaagtggaatgaaaaatatgatgatacgattgcttctttcaccgacgtcatgcaagaatttagccgcaagggaattgatgaggtatatattcagccgattactctcgtagcggatcaatgctatcaacaaatgcgtaagcaagcacttaagttcttacatagcagtgaatataatttctctcaagttaatatcggtaaacccttattaacatcgttaggtgttaaaaattacgctgatgattatgaagctacattagatggcatcatgcgtcatattaatactaagtctcttaataaatccgttttattgatggcaaatggtcaaaatcaattggaattttctacattacaattgaaagctatgtatggttctgctcctaatgtagctgtatttaccacaaatggtttccctacatttaagcaggccttaacattggtagatagaatgggtcataaagatgtactcgttgtaccattggctttgattggttctactcatttaatggattatcttggcggtgatcgttccgattctatttatgcacttttgacagaacaagggtacaacgtagatatttggaatgaaggcctaggtgaaaacccatatatacaagatttattcttgaaacatttaggtcaagcgattcgtatgtctgacagaaaacgtagctctcaacgcgaatcatatcaaactgttattcgaccttcccgtatagaagcacaaggaatgatttcctaattacttctggtaaggttgtatataaactctctcataaatacacactatcttcaaaaagcatccacctttaggggcggatgctttttgttatccatctatatgggtatgaaagttaattataatattacctttatacggggtatggtatccaactatagtaatgcgtgtggtatgatgaatagtgaattatatttgataaggagaccgttatgaaacaagctatattagtagtggcctttggctcaacagttgattccgctcgtgaacatcaaattgatgccgttgtaaaccgtattaaagagaaatatacagattatgaagtgcgtttagccttttcatcgcgtatcattgtaaagcgtttacgagaccgtggtattgaaattcctacagagcaaggcgcattagatgctctcattggtgaaggatatacagatatttatgtacaaccattgcacttcactggtggtgaagaatttgataagttgaaacataatattttaaatcacgaacgggcacaagaacttaatacattgcgagtaggcagaccattggtatactatatgggccaagaagaacacccgaatgattatcaaattttaatcgacacatttgttacatccttatccgtcagcaatgaagatggtttattattagttggtcatggtggtttaggctctggtaattctgcatatggttatttgcaatatcaattgattcgcagtggccttaatcatgttcgtgtagccactttggaaaatgctccttatgtagaggatgtggccgtaccttgggaatggcttgatggcaagaaacctaataagatttatgtgcacccattgctcctggtgcttggcgatcatgcgcttaatgatttatttggcgatgaagaggatagtgtagtcaatgtattgaaagaggctggttatgaagtagaagaaatgcatcatgccctcggtgaatattcagaaattcaagatatctattgccaacatattcaagattgtatcgatgatatatacggtaagcgcagcagtcatagaccggcgattccgaatgtgaaataagagtagactttcacaaacattttgaatatatttaataaattaggtataatagtaatgttaatcatattgaaatatagaataggagaatcatcatgaaaggtaaattatatggcataggtgttggtcctggggactctgaattaatgactgtgaaagctgcgcgtattgtaggcgaagcagacgttatcattacacctaaaacagaaaagaaagatggttctgtagcccttaatattgcgaaaccatacattcaagaacatactgaaatcgttccagttgtattcccaatggtgctcgatgatgcaacacaacaagaaggttgggaagaggctaagcgcattatcgtatcttatttagaacaaggtaaaaatgttgttttcttaacacttggcgatccaatgttctatagtacatatatgtacgtatatcgtttgattgaaaatacaggctttgaaattgaaacaattcctggtatcactgcgttctgtgccattggttcccatcttggctatccaattgtagaaaaagaagaggttttggctatcgttccagccactgcacctaaggaaaaaattgatgctgttatggctgttgccgatgatgcagttatcatgaaggtgtataaaaattttgatgaagtgcaagaagtattgttgaaacacaatatggctgacgacgcggttatgatttctcgcgttggcttgcctgatgaacaagttttcgtaggtcttgataatatgcctaaggacaagaaattaaactatttgtccacaattttggcaaaacgtaaagatcgttaattgactatactctgatgtctgaatgcttttagtgaaagccgtatagatagtattaataagaggtaatacatatgaatactgtacccattccacgtgttgttatagctggtaccaattccggtgtcggcaaaacgactattgttgcgggccttctcgcagcgtatcgagcaagtggccatagggtgcaatcctttaaagtgggcccggattatatcgatccgggctttcataaaattgcatcgggccgtgaaagttataatttagattcttggttagttccaccggatacattgccaacattttttgcatctatggcgggcgatgcagatttggccattattgaaggtgttatgggactctatgatggtggccgagagggtgtgagcagtacggctcaaattgctaagcaattaggtgctcctgttgtgctcgttatcgattgtaaggccatgggtgaaagcgcggcagccattgccatgggctttagagagtatgataaggatgtggattttaaaggcgtcattttaaatcgtttaggctccgataatcatgaacgtatggttcgcgaaggtatggaaaaaattggcgttcctgttattggtgctatacgccgtgatgatcgcatgcattctcctgaacgtcatcttggtttgacaccggttacagaagttgatcctacagaggctattgcaacgattcagcatgccgtggaatctatggtagatttagaggcactctataaggtagcggccagtgcagcacctatgccggcaccgattgatataaccaagggggttaccaaacgaacaaaaattggcgttgcttatgatgaagccttttcgttctactatccagccagcttatctgctcttgaagcacaaggtgctgaactagtttattttagccctttaaaagatagcgctattcctgatgtagatggtctcgtatttggcggtggtttccctgaaatgttcttgcaggctttatccgaaaatacggccatgaaggaatcaatccgtaaagctaatcaatgtagtatgcctatctatgctgaatgtggtggccttatgtacctttgtgaacatattcacgattttgatggtaatgtgtttgatacagttggtgttgtgcctgccaattgtgtaatgcaacaaaaactgcaaaaggtaggatatgtaacggcaacggctaaacgcaatacattacttggcaatacaggaacagctttgcatggtcatgaattccatttctccaccatggaaccaaccattgaagatttcccttgggcctttcatttagaagggggccgcaaaccgcagtcctatgatggcgggtatgctaccgataatgtgttggcatcctatctacatcttaactttgctggttctcttgaaggagctaagcattttgtagacatgtgcgaagcctttggtcatactaaataaatctattatattagtattaaatcttcatattaacaatagatgcagccctacatagtgtgacataaataataggagtatagaaatgagcgaacgtggtttaattctcgtaaatacaggtaatggtaaaggaaaaacaacagccgctttaggtgttgttttacgtgctgtaggacaaggcttgaaagttttgattctacaattcatcaaaagcggtcatggatacggtgaactagaaggcctgaaaaaactgggggatgcggttaccattaaatccatgggcaaaggatttatctactacaaccgagataaagttactgtagaagaactagaaaaacacaaagcagcagctcaagaagcgtggaaaacactagtagaagaagtcaactctgacaaatgggatctcatcgttatggacgaaatcaacaatgccattaactatgaactcatcgacgttaactccgttgtagatatgcttaaacaaaaaccagagcgactacatgttatcctaacaggccgctatgcaaaacctgaaatcatcgacatcgctgatacagtgaccgaaatgaacgtagtaaaacacgcttacgaaaaaggcataaaagcagcaaaaggaatcgagttttaagagaaagagtgtgctaggcttggccgacgcacactctttttttgtgatactagaaagttttatatgatgtagcaatagtaggcctccggaggcgactttggccctgtccctacgggacagacctggccggtgtttccctctcaccatggagttttccgaaaattttttagagtgctgtaaagggatggctgctgtggcgacttttggcccttccgataggaagacccggccgatggagccacagcagccatccctttacaaataaatagaaaattttcgaaaaagtccttgcctaaactatatcgaaaatgtataatatagtcataagcacaaggtgctaatattcttagacattaagtatgtatataactataaccaggaggttaactatggctgtacatgattacattaaatctggcgatttcgctactgaaaaacacgttcctgttatcgaagctgctgataaagtaaaagcaggtgaagcattcgacgtaaaattatccgttggtaaagacattgctcatccaaacactgtagaacatcacattgaatggattaaattgtacttcgtagctgaaggtactcaatttccttacgaagttggtgaattatccttcaacgtacacggtgacggtgcaacagcaaacgaaggccctgtacatgcagtttccgcaggtacattggcagtatccttgaataaatctggtaaattgattgctgtatcttactgcaatatccatggtttatgggaatctgaaaaagctatcgtagttgaataatagattgtatttgactgtaaaaggccagccttagggctggtcttttttttatgaagagtatgacacgtcacgaacattaactactgattataaatataatgtatgtccgctataaaaagaattttgtatttttatagtggaaaaatacctgtgtatacctttacagtgcggtttgttttgtggtaaagtatatgcatgttattttttagtacaatgataaatgagggataatagtggcattaatcgtcaaaaagtttggtggcagttctgttgcaacacctgaaaaaatatttaatatcgttgatcgtgtccttcatgaaaagaaagaggacgatcgcattgtaatagttgtatccgctatgggcgatacaacagatgacttggtagctttggcaaaacaagtaacatctaaaccatatggtcgtgaaatggaccgtttgttatctactggtgaacaagtaacaattgcattgatggctatggcgtttaatgaacgcggtcaaaaggctgtttctttgactggtgatcaagcaggtattacaagtagtgataactttaataagggtcgtattttaggtgttgatcctaaccgtgtattcgaagcattagatgcaggaaatatcgttgttgttgccggtttccaaggtattactgaatacggtgatatggtaacattgggccgcggtggttctgatacaacagcggttgctttagcaggcgctatgaacgccgatgtatgtgaaatctttacagatgtagaaggtgtatactctactgaccctcgcgtagcaaaggaagcttttaaactagaagaagttacgtatggcgaaatgcttgaaatggcacgtttaggtgcaggcgtaatgcaaccgcgtgctgttgaaatgggtttccgttatggtgtaccaattcatgttcgttctacattcagtaataatacaggcacaattattcgggaggattataccgtggaatctaataaacacgtaattacaggcgtagccgatgatacaaatacagcaaaagtagctcttgtgggcgttgaaaataaacctggtattgcagcaaaagtattcaaagcattagcagaaaaaaatgttgatgtggatatgattgttcaatctattcgttccgtaggtgaacctaaaactgaccttatctttacaattgctcttgatgatgtggtattggcacgtgaagtgttgaaagaattacaacaaactgttgatatcgaagctgttaatattgacgaaaatatggcaaaagtatctatcattggcgctggtatgttggggcaacctggcgtagctgctcaaatgtttgatatccttagtaaagaaggtatcaatattgaaatcatcagtacttctgaaatcagtatttcttgcttggttgcacaaaaccgcgtaaaagatgcagttcgtgttattcataatggtcttttgttaaacgaacgaggctaatatacatgatggatagtctacgcacatttatggatgaaatgctcgatgatcaagggcgtaaggaaggttttattagcgatttattagcgaatttaaaaacacaacctatccccacattagagcaagcacagacaggctatacaacagtgagcaatttacatggtatattttataattatgatgcgtcagaggtgaccatatcttataaggtagtaccagatatgtatgctccctatacaatgagttttcgccaatttgaggttgttctcgaagggcttttgacaagtcgacgcaatcaaaagtggcaaatcaaacaagataaataataaaatcaggacactcctataagggtgtcctaatttattttgttattatatgcgatatttatatctcataaataagaataagttatagataatccttgtaatttgataataattcttgaaaattcgtgtaaatcttcgtaatgtggtataatagatagtcaataatagattaagattttacatatatatatacattataaacaaattagaaagaagggtatctatggaactgaataaaatatattctggttttcgccttgatcgcatagaacgtattgatgaaatcaatggtacagcctatgaaatgaaacatgaaaaatctggtgctcgtcttatttatattgactcaccagacactaataaagtatttaatattgcatttagaacgactcctcaagatagcacaggtgtcgctcatatcatggagcactctgtgctttgtggttctcgtaaatttccattaaaagaaccatttgtagaacttgtaaaaggttctttgaatacattcttaaatgctatgacctatccggataaaacgatgtatcctgtagcaagcaagaatgacaaggatttccacaatttaatggatgtatacctcgatgctgttttctatccacgggcagcaaaggatccagaaattatgatgcaagaaggttggcattatgagcttgattctgttgatgatgagttaacgtataagggcgttgtattcaacgagatgaaaggggtttactcctctccagattccgtactagaacgcgaattgatgcattccttgttccctgatacaacatatggtgttgactccggtggtaatccagataatattacggacttgacttacgaaaaattcaagaaattctacgatgtgtactatcacccatccaacagctatattttcctatatggcacaatggatattgaagaacaattgcgctttatcaacgatgaatatttgagccattttgatgctattgaaatcgatactgaggtgactgagcaggctccgtttaaggaaggtaaagtgattacatatccttatagtgtaggctctgatgaaagtacggataatcgtacgttacatgcattctcctatgtattgcccgatgtaacaccagaacaaagccttgcttttgaggtattaacacatgctttattaacatctcctgcagcacctttaaaacaagcattggtgaaagccggcattggttctgatgtatctggttattacctagatagcatccgtcaaccaatttgggttgttcaagccagcggctctaatatggataaacaaggtcaattacaagagattgttgaatctacattacaacaattttgtaaggatggcatcgacaaggaattattagaagcttctcttaatagcattgagtttacccttcgtgaaagcgactttggtggtcgtccaatcggtttagcttatattatccgcatgatggacaattggttatacggtaaggatccaattgagttgttacattatgaagaagcattagttaatattcgcaaaggccttcaaggttcttactttgaggatttgattcgtcattccttattggataatcatcataagtctctcgtatccttgtatcctgaacaaggattgcaagataaaaaggatgcagatgttaaggaacaattagcagctatcaaagcttctatgtcacaagatgagctagaaggtatcgttgaacaaacaaaacgccttaaacttcgtcaagagacaccagatagtgaagaagcgctagctactattccacttttagaattgtctgatttgagtccagaagtggaagatgtggaacgtcgtgaaagtacgattggtcatacaaaacttcattttgttcctactttcacaaagggtatcaattatgtggcttactattttaagctagattgcctcactgaggacgaattattctatgcagatatcttaagtgatatcatcggccgcgtagatacatccaaacgttcttatgaagatttggcaaaattaatcaatctaaatcttggtggtttgagtgctgatattacaggcattagtaaagcaggacaacgagatgaattcgtaccgctcatggttgtacgtagtaaggtattgcatgctaaattacctgaattgtgcaacatcgtaaatgaagttattcacgatgctcaatacaccgatgtaacgcgtttaacagaacttgtacaagaaggcaaagctatttgggataatgaggcgttccgtagaggaaacaccatcgttagtcaacgcgtaatggctaaggtatcaaaggttggtaaattccgcgatgacggtaacttagggtattatcaaaaaatcagcgaattagctactaatcctgcagcattaccattattgccagaaaaattagctgatgtagctcgcaaaattttccgttctaacaatgtagaaatcatgttcgtaggtgaagaacaagaattagtaccatttacagagttgatggaaccattgctcagtacttggaatgcagaggcattgccaaataatgtattatccatagaccatacaacgagcaatgaaggtattgtcacagctggtaaggttcaatatgtggcacaaggtggtaatttcatcgatcatggatttactcatgttggtgctatgagcgtattagaaacaatcttgcgttatgaatacttatggattcgcattcgtgtacaaggtggagcctatggcgcatttgctaacttctacgacgatggtaatatgattttctgtagctatcgagatccaaatcttgtggaaacacttaatgtatataaagagttacctgaatacttacgtcaatttacattaacagatcgagaaatgcgtaaatatattatcggcactatgagtggtcttgatttaccgatgacacctgcattgcgtggccctcgtgccatggggctatactttagtggtgccaatatcaaagataaggtagcatttagaaaacaagttatcagctgtaagccagaagatatcgtagctcttgcagatgtggtagagcctgtgttaaaggataatcatatttgttccatgagtaacgaacaaaaaatcaaagatgccggtgtctttgatagcattgtatctcttggataatgtatagtttgtaaacggagtacatcctcaccatgtgttaatataataatgtattaatatatagtatattattagagtgataaggagatactatttatgaaaggacgattcgcacctagcccaacggggtatatccacctagggaatgtgtggatcgcccttttgtcgtatatatcgacccgtaaccaacatggtacctatgtggtacgcatggaagatatcgatttgcagcgctctaagcgttcttttggcgaagccttgctagatgatttagaatggcttggctttgaatgggatgagggccctcgtgtgggtgggccagaaccatcgtattggcaaagtgaacggttgccaatgtatgatgaggtcttacaacaattagagaatacaggtctaatctatccatgtttttgtaatcgtactcgcttgcaatccattgcttctgcacctcatcgaggtgaagtcgttcatcactatgacgggcattgtcgtaatttggatagtgctacggtacagctaaaaaaacttgaaaagaatccgtctatgcgtattaaggtaactgattctactatggagttcaacgacatataccaaggtctacagcattttgtactgcgccaaggtgttgatgattttgtattgcgccgtggggatggcatgtatgcctataatttagcggtcgtactagatgatatagcaatggggattactgaaatcattcgggggcacgatttactggaaactacggctcaacaaatgtatttatatcgcacattgaatgcggagcctccttgctatggccatgcaccgctgcttatagataacgatggacataggctttcaaaacggcagaaaagtataaccgtaaaagaattgagagatatggggtggactgcagaacgtattttgggagaattagctgtattggcgggattgatacctcaatgtgatgcaccgagtatttctctagcatcattattaacatatacagcacgaaccgaagagttaggctgtgaacatattgttttaaaaaaatcgatatgatatattgacaattttcgatattgatatataatagtatataagaggtggtaagaatgactattaaagatgcgttagctgaaaaagtttgggctgtaataggtgccactcataaaaccgataagtttgggtataagatttataagtgcttaaaagagcatggatatgaagtctatccggttaatccaaatgtaacgagtatcgatggcgatacttgttatccaagtctatcttcgttgccagttgttcctagcgttgttgattttgttgtaccagaagcagctgggcttgcagcaattgatgaatgtaaacaattgggcattaagatgatttggttacaaccaggtgcggataaaccagcagttttagctaaggctaaagaggtaggtttggattacattcaagattgtgtattagttcaattgccttaggaggaaataatgagcgaattaaaagagttaaaaacagcagaatatcaagatcttcttaatcaaggtggcgtaacagttattgatttctgggctccatggtgcggttactgtgtacgtatgatgccagttattgaagaaatcgctggtgaactagaaggtaaagcaaactttgtaaaagtaaatgctgatgaagaaccaagcttggcacgtgatttacaagtagaagtattacctacatttgtaattttgaaagatggcgaagtagtagatcgtaaaattggtttcttaccaaaaggtgatttgcaaggtgctatcgaatctaaattctaattagattaataaacggtaaaatatataaggcctattaatgtatacatatacattgataggccttttttatctgtgtaaataaaaatacaagtaaaaatattaattaaatataaaatgaagaggaaaatttctatatcggaaaaatttgataaacaaggctttttcaagattgttgccatataaaacgatgagtaaaatatgaagcataagtttaacttattaaaaaaacgctttaattttaaaatatcttgtgctagtatttaattagatattgtgaatatttagtgaagtatattccagtatttttcatttatttcatctgtgcggggtgagagccgcataagttgggagggaacttaatatgaataaggtattcaaagtagtatggagtgcgactaagaatgcatatgtagtaacatctgagttagctaagtcgcatcaaaaaacagcaactacaattgtagctgcaattttgttaagtgccagtttgggtggaggcattgcttctgcatccacacctgcagattggtatagaactgatcttattggtagtcaaaaatggttaacacctggccaaggtagtcaagcagttgaacaacaaccaattgatttacatcaacaagatcaacaagatcaacaagatcaacaagatcaacaacaatggcaacaaagccaacaaaatcaacaacaaggtcaacaatggcaacaacaagaccaacaacaatggggccaacaatctcaaaaacaaggctctggtaaggttattgttgatttaactaatattaaaaatcaagttaaccaaaatacttacaatattagcgtattgaaaggtaatgttaactgccttaatagtaaattctattgtttagctgataaggtatctaaaaatacattagcgattaataatcttaatgtaaaagttgatacacttaataacagtgtgaaaaacattgaaaacaaagttacaaataatgtaactaaaaatgttatcaacaaggttactaacaatgttattaatcaagtaaataacaacatcaaaaaagaaattcaaaataataacactactatcatcaatcaagtaaatcaaaatattgatgctaagattgaaaataacaatacaacaatcattaataaagtagaccaaaatattgatgctaagattgaaaagaataatacgtctatcatcaatacagtaaacaaaactattaatgaaagtattcaaaacaacaatactgttattaataacaacattaaaaacgaaatcaatgctaacaatgtagaaatcaacaagactattaagaatgaaattaatgctaataacaccgttattaacaataatatcaaaaatagcattgaagcgaataatgttgaaattaacaaaacaattgttaataagattgacgaaaataatgtaaaaatcaatcaaaatattgctaatgttaaaaacgaattacaagcgaatattaacaaggtagatgttaaggtagatgctaatagtaaagctatcaacaacttgactgttaacgttaacaataacagcaagtctattgctgacttgtctaaacaagttaacgaaaacactaaaaatatcactttcaacaatactattgcgatagaaaaccgtaaacttatcggcgataacaaaaaagacatcaatgataataaaaaagctatcgaagagttgaaaggtaaagttggtactactatcaacaacatcaacacaacaattgataataagattaatgaaaacaacactaagattattaatcaaatcaataaagatgtagacattaaaattgataatagtaaaacaaatattatcaatacagtaaatactaatattgataataaaatcaacgctaataacacagttattaacgctaacattgataatagcattaaacaaaataatgtcgaaattaacaagacaatcaaaaatgaaattaacgctaataacacagttattagcgctaacattgataatagcattaaacaaaataatgtcgaaatcaataagacaatcaaaaatgaaattaatgctaacaacacaactattatcaataaagtgaatgctgatgttgatgctaagattaataatgttaacactacaattaacaatgtaaacactaaggttgatggaaacacaactaaaatagaattcaataataatcgtatcaatacaattattgaagctatgggcaaccatgaaggtcgtttacaagctgtagaaaaggatgttaagaatatcaagactgatttgagcaatactacaaatcaagtcaatatcaatacaaaggatattgctgatttgaagggtaaagttggtcaaaatattggcaacgttcaagtagatattaacaatattaaaaatgatattacaaacatcaataaaaagattgatcaaaatgacattgctatcaatacaaaagtagataataaagttaatgaaatcaatactaagatcgataataaggttacagaaatcaatactaagattgacaataaagtaattgctattgatcaaaaaattgataacaaagtaactgaaatcaatgcaaacattgataataatgtaaatattattaacaagaaaatcgataacaatgtaaatgttattaatacaaaaattgataataataatattactatcaacaaaaaagttgataataaagtaaacgaaatcaatactaagattgataacaaggttaacgaaattaatgctaagattgataagaacgatgtaactatcaatacaaaggtagataataaagttaatgaaatcaatgctaagattgataataaagtaactgaaatcaacacaaacattgataacaaggttaatgaaatcaatacgaagattgataacaatgttatcgacttgagcaagaaaatcgatgctaatatcgttgatgttaacaagaaaattgatgctaatacaacagcaatcaataatgttaatgttcgtgtagatggtgttaaaggtgatgtagctggtcttactaaacgcgtagatcgtcatgacgaacgtttagactacttgcaaggcaatattgaagataactccacacgtattagtgctaatgaagatgatatcaagaaattaaaaggccaaattggtacaacaatcactaatgttgaaaatacaatcaatgctaagattgaagctaacaatacagtgattagaaatgatatcaatactgcaatcactaacaacaatactacaattcttaataaagttgataaaaatatcgatgttaaaatcaatgaaaataacacaacaatccttaataaggttgacaaaaacatcgatgtaaaaatcaacgaaaataacaaacaaatcaacaatacaatcaatactaagattggtgaagtaaatgttaagattgacggtgtaaaaggtgatttaaatggtcttaaaggcgacttggatggtctcaaaggtcgtgtagatcgtcatgatcaacgtttagattacttagaaggcaatattgtagataactctacacgcattagtgctgttgaagataatgtaaaggttaatactactaacattgcaaacaatactaagaatatcaatatcaatgctaaagctatcgatgaattgaaaggtcaagtaggtcaatcctctactgttatcaacgatattaaaaaccaaatcactaatatcaatggtaaggtagaaaataacactactaatatcacaaataatactaagaacatcgctgtaaacgcacaagctattgtagataatagtaaacgcatcaatgaaacaaatgttaaggtagaaaataacactactaacattgcaaacaatactaagaacatcgctgttaatgcacaagctatcgtagataatagtaaacgcatcaatgaaacaaatgttaaggtagaaaataacactactaacattgcgaacaatactaagaatatcgctgttaatgcacaagctattgtagataatagtaaacgcatcaatgaaacaaatgttaaggtagaaaataacactactaacattgcaaacaatactaagaacatcgctgttaatgcacaagctatcgtagataatagtaaacgtatcaatgaaacaaatgttaaagtagatgctaatacaacagctattaataatgtgaatgtaaaagttgatggtattaaaggcgatttagatggcttaactaaacgggtagatcaaaatacaaaagatattaatgtagctggcacaattgctcttgaaaaccgtaagtttatcggcgacaacaaggttgctattgaaaataatactaagaatatcaatatcaacgctaaagctattgatgaattgaaaggcaaagtaggtcaatcctctacagttatcaacgatattaaaactcaaatcactaatatcaatggtaaggtagaaaataacactactaacatcacaaacaatactaagaacatcgctgtaaacgcacaagctattgtagataatagcaaacgcatcaacgaaacgaatgttaaggtagaaaacaatactactaacattgcaaacaatactaagaatatcgctgttaatgcacaagctatcgtagataatagcaaacgtattgatgcaacaaatgtaaaagttgatgctaatgcaactaatattgcaaagaatacaacagctattaacaatataaatgtaaaagttgatggtgttaaaggtgatgtagcaggtcttactaaacgtgtagaccgtcatgatcaacgtttggattacttacaagataacatcgcagatcattctacacgtatcagtgttgtagaagatggtgtgaaatccaatactaaagctattgatgaattaaaaggccatattggtactcaaatcacaaatatcgaaaacactattactaacaaaattaatgaaaataatgtagttattaataagtctatcgataacaagattactgaaaataacactacaattcttaacaaggttgataaaaatattgatgtaaaaatcaatgaaaacaacaaacaaattaacaacacaattaatacgaagattggtgatgtaaatgttaagattgatggcgttaaaggtgatgtagcaggtcttaaagctcgcgtagatcgtcatgatcaacgtcttgattacattgatggcaacattattcatcattctgaacgtatctctgctaatgaagatgctatcaagaaattgaatggtaaaattggtacaacaatcacaaatgtagaaaatacaatcaatactaagattgaagcaaataatacagtgattagaaacgatatcaagaccgcaatttctaataacaacacagtaatcaacaagaatattgatactgcaattaataacaacaacacaactattattaacaaagttgataaaaatatcgatgcgaagattgttgaaaacaatacgaagattgatagtaagatcaataatgtaaatgtaaaagttgatgcgaatacaaaagctattgaaaacaatagtaaatctattacagctattcaaaataatgtagccaatattaatagtaaagttgatgtaaatgcagcagatattaaagcaattcgcactgatgtaactaataatacaacagctattgctagtgtatctaaacaagtagcaggtaacactgcaaacatcgcagatgtttctgctaaggtaaacgctaactcaactcgtatcgatgcaaatgcagcggctattggtaacttgaacggcaaagttgattctaatgcgaaagctattgaatccttgaaaggtcaagtaggtaaaggcaacactacaatcgttaatgttgaaaagaaagttgaaaatattacaaacaacattaaagctcaaaatagtgttatcaatgctaatactgtaaatattcaaaacaatacttccaacattaacaatattaaagctaatgtagtaaatgttgaaaagaatgttaacaatatcaaagctgatgtaactatcgtgaagaatgatattactaacatcaatgcgaagattgatgcgaagattaatattgtgaacaacaatgttgaaaacatcaagaatgatgtgaagactatcaataatcaagttacaaatattaagaatgatgtaactagcattaaatctgatgtaactagcatcaaatctgatgtaacaaatgtaaatgcaaaagttgaaaacaatattaagattatcaacggcatccaaacagatgtatctggcttgaaagatcaagttggcaaaaatacacaagcaattaaagacttgcaaaatgtaagtgctgatgtatctaaggtgaaagaacaagttaatgcgaatacaatcaaagctaatgctaacgaagaacgcattaaaaatgttcaaagccaagtagaagttaatactgatagaattaaacacaatactgaaaatatcaatattaacaaagctgctatcaaacaaaatgcacaagcaattcaaaatactaatgtaacagttcaaaaagtaatcaacaaggttgatgaacatactacagcaattaatagtgtatctgctcaagttaacaaaaatactaacaatattgcctctatcaatgcatccgttattgaaaatacaaacaatattacaaaagtaaataatcaagtaacagcaaatactactaacattgctaaagtatctaatcaagttactacgaatatcaataatatcaatgtaaatgctaagaatattagtgtgaatacagaaaatattaaaaacattgatagccgtgtaacaactaatgcaaatgctattgttggtattactgaatctgtgaaagcaaatgctactaatattaacactgttaataaccgtgtaacagaagtatctaaccaagttaatacaaatacacaaagtattgctactgtaacaaatcaagttaatgacaatactaaattaactaaggcagtaggtgcgattgcattggaaaacaacgaacgtatcaatgtaatgggtttacaagttaacaagaatactgcagatattagtacattagctgaagctgcaaattacagcttgcgtgcaagtgcattaacaatgcaagatcatgaaactattgaacaacatacagcacaaattcaagataactctcgtcgcattagcagtgtagaacgtgaagttaaaacagtaggtgcatctgcagccgcattggcagcattgaaacctattgaataccatgaaggccaaaaagctcaaatcatggcagctgttggtacatacaaaggtaaaacagcaactgcattaggtgttgctcattatgcaaatcctgatttgttattccacgctggtgctgcttatgatggtgataatggtgtaatggcaaatgctggtgtaactattggtattggctccgctcctacagcaccttccaaaccagcatctcctgcaactgtaaaagttctagaagataaggttgctagcttagaagcacaaaataaagaaattaaagaagtgcttgaaaaagtattagctgctaatcctcaagtagctaaaaagacaactaaataagatacctcccaaaaggtaggcactgaatacctgtctatctaaggtatgtataaccgcgtagtacactcgtgctacgcggttttcttttgatttgaagatgaaggaaaattcataatttcaccaatttttatgttttatttattgtaacgagtgggggattgtggtaaaatttaccatatagtggtgaatgaggattgtaaggcggtgatgttagatgttcatgggtgaatataatcacactatagatgcaaaaggacggttgattatacctgccaaaatacgtgaacaactaggtgatcactgtgtactttcaaaaggcctcgataactgcatcgctatatatactgccgaaagttgggagcaactttcaaaaacattacaatcattaccatctaataaagcaaatgcgcgtgctatcaaacggttttactttggtagtgccgcagaacttgaatttgataaacaaggccgaatcttggtgccaagcgcgcttcgtgagcatgctgagctacaaaaggatgcggttattattggtactggtgataaggttgaaatttggagccgcgaacgctttgatgcatatgatgcggaagtggctgacagtgtagagtccttggctgaaggattagaaggtattgtgttgtaggaggctatcgtggaatttaatcatgtcagtgtgctgttgaatgaaacggtggattctgttgttaccaatcctgatggtatctatgttgactgtaccttaggtggcgctggtcacgctcatgccgtaggtgaacgattgagttcacaaggcatgattatcggtttagatcaagatgaagatgccttagcggtagcgagacaacgcttgtctgatttaacttgtcaggttatgacgatacctacgaatttttcagatttaaaacatgctttagaagagcaaggtatttatgaagttgatggatttatattcgatttaggtgtttctagttatcagttggatacaccggaacgcggtttttcttatatgaatgatggacctcttgatatgcgtatggataaagaggcacctattactgcggaaatcgtcgtgaatgaatatgaatctgataaattattacagattatccgtgattacggtgaagaacgctgggctaaacgtattgttgaatttatcgtggcagcccgtaatgaaaagagaattactactactggcgaactggtgtcaattataaaaaaagctataccagcaaaagcaagacaggatggtccacatcctgcaaaacgtacatttcaagcgatacgcattgaagtgaatcgagaacttgctattttgcatgatagttttgtagatgctgtgagtatgttgaagccaaaggggagaattggtgttattacattccattccttagaggatcgcatcacaaaacaaacatttaaagagctaagtacagcttgtatttgtccgccagaattaccagtatgtgtatgtcatcataaggctgttcttaaggctaaaaataaggccattgagcctagtgcaggggaagtagaaatgaatcctcgttctagaagtgcaaaacttagagtagggattaaattgtagtattggaaggggttattttaatgttagcgagaaaggctgttgtgggccacgttaaacgtgatgtgttgctaggtgtacaagcgagaaaagctaaagctagtgttgtttttgatattagtccattgatgagacaaatcattcaaggtatagcaattcttgttggttttttgatgatcatgatggctatgaacgcatatactacaaaattaggttatgaagtagttaaaacacaacaaactgtagtacaattagcaaaggataatgatacccttgatgtagaggtggcatccttaaaatctccagtacgcattcaaaaaattgcggaagaacaattagggatggttttgcctgattcctttgtgtatagcactaaaagtacgacttcagaacgcaatgtacaaacgaaacagcaaattatagattagcaggcaaaagcagctcttatgggctgctttaatttgcgtatatagaggagaatgtagtatgaaaaccttaaaagatattataagtacgttagatgcacaagaattacaaggtgatcaaaatgtatctattcaagatataacagctgattccagagcagtaaaaccaaatagcttgttcatcgctcttgatggggctacagttgatggtcacaattacatcgataaagcggttgctgctggtgctgttgccgttatcgtatcaaaaccggttactgtacctgatgatgtgtgtgttatcaccgtttctgatacacgtcaagctatgatggcgtgtgttccatacttctttgattacccagctaatcgcatgcgtatggtcggtgttacaggcacaaatggtaagacgactacgacccatatgattcgtcatatccttaaggctcaaggtcacaaggtgggggttattggtactgtccatattatgattggtgatacgagttatccaattcataatacgacaccagatgttgttgatttacagcatattttgcatcaaatggttcaagaaaatgtggaatactgtgtaatggaagtatcttctcatgcattggcgctcggccgtgttagcggtgttgaatttgatacggccgtatttacgaatttgacgcaagatcatttggatttccacaaaacatttgaaaattacttggctgctaaatgtaaattgtttgaacaagttagtgcagctaatcaagaaaaagataataaaggtgctgttattaatatcgatgattcctatggtcatcgcgttatggaaaaaactacggccccaacgattacgtatagtacattaggcaagggcacattgaatgcatcagatgttcatatgtctactaagaatagccagtatactgtgaattataagggtgaaagctaccctgtatcgatgaatacaacaggactatttaatgtgtataatacattggctgctattggagcttgtttacaagaaggcatctccatggaagcgattgatacggcgttaaaaacctttagttccgttcctggacgttttgaattaatcgaagaagggcaagattttgccgttgttgtcgattatgctcatacaccggatgggttgcaaaatattttagaaactgcaaaggcaattaaagaaaatcgtatcatcatcgtatttggctgcggtggcgaccgcgatgctacaaaacgtccaattatgggccgtattgcagcagagtacggtgataagatttatgtaacatccgataatccgcgtaccgaagatcctgtacaaattgttaaggatgttgaagtgggtgtaaaagaagcacttcgcgatggtacttcttatgaggtaattgtcgatcgtagagaagcaattaatcatgcaattcatgatgcaaaagcaggtgatatcgttattatcgctggtaagggtcatgaaaattatcaaatattaaaaaatgaaacaattcattttgatgaccgagaagaggctcgaaaagctcttaaggagatctaatatggcagaatttacattacaagaaataattgatgctactagtggcacatgtaagggcgatgtaagtttacaatttaaagatatatctacagatacgcgtacgattgaagcgggatatgtatttgtagccttgcgaggcgatacatttgatggtcatgattttattaatacggctattgaaaaaggggcaacagcagcaatcgttgaaaagggacgcagtgtagacggtattatttgtgttgaagtggaaaacacgctaaaggcataccaagacttggcgaactttcacagacgacgctttcaaattcctgtagtagccattactggctcatcaggtaagacgacgacaaaagaaatggtagctgcggttcttagtactgagtttaatgtattaaaaacagaaaaaaattttaataatgaaattggtttaccaaaaacattgttgcaactttcaccagaacacgaagcctgtgttgtagaaatggggatgcgtggattaggtcaaattgaagaattagcccttattgcagaaccgacaattggcatcattaccaatgtaggaactagtcatattgagttgttgggttctcaagaagccattgctgaggcaaagggtgaattgattagatgtttaggccccgatagtgtggccattctaaatgaagatgattatttcgtaaaggccatgagttccattgcaaaaggaaaaactgttacttacggtattcatagcaatgctacggtaattggcagtcatttacgctataaaaaggatggcattaagtttacctgcaaatgttatgacgaagtatttgacgtatttttgcctatgattggtgagcataatgtgtatgatgcgttagctgctattgctgcaggtcgtgtgttaggcgttaaatctagtaagattaaaaaaggtcttagtgattttacaggcacacctatgcgtcaagaaattgtggcatttgaagacattgttattctcaatgatgcgtataatgccaatccttcttctatgagtgagtccatcaaagcattgggtcaattagaaggtaaacgtaaaattgctatgctcggcgatatgcttgaactaggtgattttacggaggaaggccatcgacaagttggcagattattggccgaagaaggatatagcgttgtatttacctttggtgaggcggcaaatttcattgctaaagaagcgaaattagcaggtttagaggtacatcgttgtaatagtcatctcgaaatggcaaatgcctacaatgatattcgtgaaaaaggcgatgttattttggtaaaaggttccagaggtcttcgaatggaacgtgttgtagaggaattaaaagaacgtgaatagaggttataacggctagattcttctagccgtattggccgttattagagaataggggagtaatatgatttaccacattctattagcatttgtagtgacatttataattacattagtattgggcaaaattggtattcctatgcttaaatcattacatgctcaacaaagtatacgtgaggaaggtcctgaaagccatcaagctaaggctggcacaccgactatgggtggtgcatttatgatggtagctcttacaatcggtgtggctatttttgcaccatggaatgtggctacaggtatgttgttattccttacacttggtcattgtttactcggattctttgatgactttgtaaaagctgttaaaaaacgtaatcttggcttaactgcaaaacaaaaattattaggtcaatttattttagcggctatattctgttactttattactgaaattatggtcattcctacaacattatggattcctgttgtagatgcacatatccaattaggctttgcctattatattttagctttcttgatcattgtaggcgctactaatgcggttaatcttacagatggtctcgatggtttagcatccggtacatccgctgtagcagcgattgcgttttctgtaatcggtttgatgatatactccactgaaagttttgtggctgctgaaagcgtagccttttttgggtccattgtaacagccgtatgtttaggctttttggtatttaatattaatccagctaaggtatttatgggcgatacaggctcattggctcttggcggcgcctttgcaggcatggctattttaactaaaacagaattattactcgtagtgattggcggtattttcgtaatggaagccttgtctgttatcattcaagtcatttcctttaaaacacgaggcgtgcgcgtatttaagatgagtccaattcatcatcattttgagttatccggttggtctgaacaaactgtagttaatcgcttctggttcggtggtgctgttctagccattttaggggttatacttgcaactgtaacaatttgatatcagaaacgtatctttgcaaattgatagttaagtacgtgaaaatacttaacttgaatggcgtttaatggtattcttataagatgagataaaattttttcgtgcttagtgatttaggtgatacaaatggattatggagagaaaaatattcttgttcttggtgctggttccagtggaattggtgccgcatgggtattggcacagttacatgcaaatgtagttttaaatgattataaaccagtagagtttgaaccatctacgcgtaaacgactggaagacgctggtgtaactatcattacagggcgacaagataataacttgcttgatggtgtagatcgtattatcatttctccgggcattgccttatccattccgatcgtacaagaggcgttgcatcgtaagattgatgtagtaagcgaagtagagcttgcttatgatgtttgcaaatctcctattttaggtgttactggcacaaatggtaaaaccactacaacaactctgttaacgcaagttatggaatctactggacttcctgttaaagtgggcggaaatattggtgactccctaagtgaagccgcgtatcatatgccagaaggtggctatctagtagctgaactctctagttatcaattagaaacgattaaatctttttgcccattaggcgctattgtattaaatgtaacgcctgatcatttagcacgtcataagacgatggaaaactatgcagctgcgaaggctcgtatttttatgaatcaaaatcctgagaattttgttgtcctcaatgatgatgatcctattgttcgggctatgaaaaaagatgcacatagtaaggttctcagcattagccaacatcataaggttgatagcggtgcgtattttgaagggaatacatgctatgccgtattagatggtaaagctacttcggttattgatacagaacatatccacattaagggctctcacaatattgaaaacatattggctgtaattgccttaacatatgctttaggtgtaaaggtagagcatattaaacgtaccattgaacagtttcatggtgtagaacacagattggaacgggttacaacattccatgatgttacattttataatgattctaaggctactaatacagactctgtagtaaaagctttagatgcctttgataaaccagtcattttattggctggtggtcatgataagatgacgcctttagaagactttatgaatattgtgaaagcacatactaaagaggtcatttttatgggggaagcagcagatcgatttgaatccgttgctgtaaaaatgggcgttcaacatattcatcgtgcacagtctatgaaagaggctgttgcattggggtatcaattagcaaaagctggagatattgtattgctttcaccagcatgttctagctttgattggtatagttgctttgaagagcggggcgaagattttaaaaactgtgttagagaattagaggaaaggggctaagggcgtgaaacgaatcatcatttctggcggtggtacgggtggtcatatttaccctgccattacgatatataaggaaatcatgaaacagcaacctgatgctaaggtcctctatgtaggaacagaacatggtttagaagctgatttggtaccgaaggagaacattgattttgttacattacctgtacaaggtatgcaacggaaactttcattaggtacattggtaacaatggggaaaacggcattttctcttataaaggccaatttaattatttcagactttaaaccagatgttgttattggcacaggtggttatgtatgtggtcctattttaatggctgcagcattacgcaatattcctacattaattcaagagcaaaatgttattgctggtattacgaataaaatcttgagccgttttgttgatatagtcgcagttggttataatgaagcagccaaatcgtttggtaaggcgaaacgtgtcgtatatacgggtaatccagtacgccctgatgtacttgtagattctcgtacagaaggccgccaattttttggtctgtctgatgatatttttacagtcctcatcgctggtggttctcgtggggcacgtacgattaatacggccatgatagatgtacataaacattttaaaggtaagccgggcattaagttgatacacattacagggaatggggaatataacactgtattagagcaactaggtattgacgatggtactggtttgggagaatcatcgttgattttgccatatttacatgatatgccaaaggcgctagccgctacggacttggctgtatttagatctggtgctatcggactggctgaattggcagtacgtggtattccatctatattggtgccgtatccttatgctgcagaagatcatcaaacgtataatgcgcgcattttcgtacaagaaggggctgcgcatatgattgtagataaggttttgacgagccatgatttaattggtgaaatcgaaatgtttatggcaaatcgtgaattgttggctcaaatgggggctagtgcgttgcgtttaggtaaaccgaatgcagctcatgatattgctgaattagcgttatctattgctaaatagttaaggagagtaattatgttagaaggtatccataagattcatctcatcggtataggtggatctggtatgcgcgctattgcgaatattttaattcaaaaaggatatgaagtatctggttctgatgttaaagaatctgatgtaattgaacgttttagaaaaatgggggctaccgttcatatcggtcataatgctgattatgtacaaggtgtagatgctgtagttcgttccacagccattcgtgaagataatccggaaatcgtagcagcaaaggaacaaggtatcactattttacatcgctctgacattgtaaaagccgtattggatgttacaaatggcattgccgtagccggtgctcatggtaaaacatctactacatcaatgattggtcaaattctcgtagaaggacaaatggaaccaactgttattatcggtggcgaagttgattacctcaaggggagtagttgtttaggtaagggtgaatactctgttgttgaagccgatgaaagtgatggttcattcttaaaattaagacctaagacgattgttattacgaatatcgaagatgatcatatggatcattataagacgatggaaaatctattgaatgcattctgtcaattcgttgaaacattacctgttgatggtaaagcagttgtttgcggcgataatgataacattcgttatgttatgagcaaagtggaacgtcaatttatcacatatggtttagaagagtctaatgattatgtagcaaaaaatatccactatgaagatagttctttagtttacgatgtagttcgtaaaggtgaaacattgggcagagtgtccttacgtgtaccaggtaatcataatgtgctaaattctttagcatcttttattgtggcccacgaatgttgtcacgttccggtgccatccattgtgaaagcattaggtaaatttatcggtgctaaacgtcgttttgaaacaaaggggcatgtagctggtgtatgggtagtcgatgattatgctcatcatccaacagaaatcaaagcgactctaaaagccgctaaggaattagaaaagcatcgtgttatctgtgtgttccagcctcatcgttattctcgtacatccttattgaaagacgagtttgctacggctttcaccagtgcagacgaaatttatatgacagatatatacagctctggagaagatccaattagcggcattgatggtcatacaattccgaatattattagtgaagtaacgcatcaacatgtaaattatgtggaagatgtaaatgatttgccagcagtccttgcgagggtggtacgaccaaatgatttggttattactatgggggcaggttcgattaatcaatatggtccaaagttattagcgttattggaagaaggtttacaatgaaagataaacatatcatcgtattaatgggtggtccatctgctgaggctgaagtatctcgtagaactggcgcagccatcgcagaggctttgattagcaaggggtatcacgtttccacattagaactaaatcctcgtactgtattacaagacattgaaaaccttaagggcgatgttgtatttaatgcgattcacggacgttatggtgaagatggtgccttgcaaggtgcattagagatggctgaaattccatatactggatccggtatcatggctcattctgtaggaatgaataaaaaagtaagtaaggatgtattcaaaggcgctcacattcctacggcggaatctatttcctacaatggcaatctacagtcgaaagaagatatcattaaagatattgaatctaaattctccttgccggttgtattgaaaccagcaacacaaggttcaagtattggcgttaccattgtaaaagaagaagatcaattgactaaagctgttacagaggcgcttacatatgacccaattcttgtggtggaacaatatttaaatggtcgtgaatttaccgtttctgtattggatggtaaggcattggctatcattgaaattagaccacattctggtgaatatgattacgctagtaaatatacagcaggtgctactgattatttagtaccggctccaatcagtgcagatatgacaaaagaaatgcaagctattggtgagcttgtgtatcgtgaagtacaagcgagtggggctattcgcgttgatgtcatgactgatgataaagataatatgtatgtattggaatacaatactattccaggtatgacggctacttctttggtgccaaaggctgctaaagaggtgggcatagatttccctgaattatgtgaaaaaatcttattaacagcaggttatgggaagttttaaatgctgtagtatgtaaggagagtagttatggatgattttaagcaacatccacccaactcaaatcagatagatacggagcatcatagacccgactttcttcatcctgagactgagccaatccacaaggatgatggggattcaatacataacagtgagcgtgaattagctcgtaaacgtaaacaagagaaagcggaggttagaaagaaatttctaaaaataggtggtgttgtagccatagtgttgttaggcttatttaatctacctattccgcttggttctattaaagttattggatctgataaggttactgtacaggatgtagaggttgctggtgatattggggaaccagtcaatgtacttcgtatcaatagagaaaacttgcgataccgattatcaaaggatcttcgtattgaagacgctcaaattggttacgaattgccgttaacaatggtggtccgtgtagtcgagcgtaaggctattgctgtgataccagctcaatttgggtatttaaccttggataagaatgggcaagtgattgcatctgatagtgtcattgaagacacgacggtgcctatgatttctggtgttaagggtggtaatatactgctaggtgatatggttaccgataagccgattgtacaggctcttgattatctgcgtgccttagatgatgatacatttaagcaaattgcagaaattaatattggtgatcctaataatatgatggcgtataccgtatcaggtatacagattcgactaggcgatggcgaagatttgaaaagcaaagccgatttaacagcgtctatgctaaaagatttacctaagagtcaaggtaatgttcaatatatagatgttaatccgtcatctcctttcattaaaaccgataaggtaacggtgcaaccaaaatctaataaatctaagtcagacactagccaatctgagaaaaaagatacatcaaaacaaagtgctaatgtatcaaaatcaaaacaagattaattataagcacaaaaagggtggatgatgttgtgaaacacgaacgatgggctattggtcttgtcagctttgtattgggattcatggtcattactcagtacaagatgacacaagataatattcaagagaatatacggctacaacgaactggtgatttggtggctcagttaaaagatgcagaacatgaaaaggatgctttactaaagcaaattgagcaattaaaagccagtggttctggttccagtgcagatgaaacattacttcgcaaagccgcattgactaatgtcaaaggacctggtgtaaccgttctgatagaagatagtgctaaaccaattcaagggggcgaaaatcctaacctatatgtaattcatgatgaagatattttacgtatcgtcaatgaattacgagctggtggtgctgaagcattggcaatcaatgatcaacgtttgattggtacatctgaaatccgttgttcaggtcctacgattaccgtgaatggtaaggtgtatggcgctccatttacagttaaggccataggggatcctaaaacattgaattcagccctcactatgcgtggaggtattgtagactctttaaaacattggggcattaaggtgaccataaaagaggagccatccattgccattccggcatttaccggttcttatagagaagagcatttacaatcaaatgagttaggaggtaaagaatgaatatttatatctttgctatcattggactcatagtaggtgttgttgtaggatggtttacaccattacatattccagcaagctatgctaattatacttctgtagctgtgctagctgcattagatgcggtatttggtggcagtcgtgccgcattagagagactatttgatttaagtaattttatcagtggattcttctcaaatgtaatacttgctgttgtattagtatatattggcgatttaattgggattaatttatactacgttgccttgattggttttgggttacgagtttttattaatttagctgctattcgaaagaacattatgactaaacgtttctaattatcaagattcgattatagttgtagtggaaagtttttaaattttagtgtaaaataaatgtaattgttataattaactcagtatataaatagatgtattcgtatttatattgacagaaatagataacgataagaggaggaagttcgatgtctgattttgcaaatattaaagttatcggtgtcggtggtggcggtaataacgctgttaaccgcatggttgaaagtgaactaaatggggttcaattcttatccgttaacactgaaagccaagtacttgaattgtccaaggctgatgtaactattcaaatcggtgaaaaagttactaaaggtcttggtgctggtgctaatccacaaatcggtgaagcagctgctcaagaaagtcgcgaagatatcatcaaagctcttgaaggtgctgatatggtattcgtaactgctggtatgggtggtggtacaggtactggtgctgctcctgtagttgctgaatgcgctaaagaagtaggcgcattgactgtaggcgttgtaacaaaaccttttgcatttgaaggtaaacgtcgtcgtgctgcagcagaaaaaggcattgaattcttgactcaaaaagttgatacaattatcgttattcctaatgacaaattgttacaagttgtagataaaaaatgctccttgtctgatgcatttggtaaagctgatgatgttcttcgccaaggtatcaaaggcatttccgatttgatccaaattcctggtttaatcaaccttgactttgcagacgttaagactatcatgactgaacaaggcgaagctttgatgggtattggtttagctactggtgaaaaccgcgctgcagacgctgctaagatggctatcaacagcccattgttggaaacttccatcgatggtgctaaaggcatcttgcttaatatttccggtagtgcaaacttgagcttgttcgaaattaacgaagcagctgaaattatttctgatgcagcagatcctgatgcaaatatcatcttcggttctgttattgatgaaagcttgggcgatagcgttcaagttacagttgttgcaactggttttaactccagtactaagaatgttccagaattcggtaaaacaacaactgctgcacgtccagcaacaaacacatctgctcctacaagcagcatccctgatatccctgtattcatgaaacgctaatatttaagatatatacttatacaatattagaataaaagtaacttattaagacacatatttatgtgtgtataggaggtacaaatgaaaaaattagtattattatctttagctgcaacagtgattactggcagtgcattcgctgcatccgtgcctgtaactaaaatcagtgataattccacaaaaattcaagctgattatgcgttcaatcaacgcgtatctaatagcggtggcactaacaatgatggctttggcgtatctttagaacatgatttaagcaataaatctgctcttcaatactcttataacaaagtaaatgctaaaaatggcgatattaaagatcaccaattggcttatgtttacaaagtacatccaaatgtaaatatttacggtgctggtacagctatccgtacacatgacactgagttaggtgttcaagctggtgtaattggtcacgtgcctttgactgacaaagttaacggctttgctaaagctggttggggcaacgatattaaacaatcctatcaagtaggtgctcaatatgaagttaaacctaacattgatttgaatgtttattatggttatgacaaatatagcgtaaacgataatgacaagacttccaaaggcttacatgctggtgtaggttatacattctaatcgtcatatatgcaattgaaaccactcatctttgatgggtggttttttgtattcactcatgtatacaatatttttcatgaatactcattgtataaatgcttaactttaggtatgatattgatgtaatagttctttttagttaggatggtgtatgcgatgacaagtgtagcagcgaaacacgcaagaggaaaaaaattaaaagatgtaatctttgtaactgcaggacaggcggcggaagatacaaaattaaatggtcgtgaaaatgtagtaaatggtactttgggtgctatttatgatgaagaaggtaatttagtattcttaaaaactgtaaaagaagaatatttaaatttatctgacaccgaacatattggatatgcccctattgcagggattccacaatatttggaatgtgctgaaaaagaatgctttggcgattctcgtcctgacggctttattcgtagcatcgcaactactggtggtacaggtggtattcatcatttggtacataactatactgaacctggagatgaagtattaactgcagattggtactggggtgcataccgcattatttgcagtgataatggacgtacacttgttacatactctttatttgatgaacataataactttaatcatgatgcattccaacatcgtgttaaggaattagctgctaaacaaacaaatgttgttatcttatttaatacaccaggtaataatcctacaggatattctgtagaggataaggactgggattctattcttagtttcttgaaggaattagttgctattggtcgcaataacgtcatcattggtatcgatgtggcttatttggattattctggtgaaaaagaagaagtccgcgcattctttaaaaagatggggcacttaccaaaggaaatcctagtttgtgtatgttatagcttatctaagggctttacaatgtatggtcaacgtgttggcgctatgattggtatttcttctgatgaagaaatcgccgatgaattcttagaagtgaataaatcgactagtcgtgcaacctggtctaatatttgtcgtccagcaatgcgcgctatggcgaatatcgtttctgaccctgataaatttaaggcttatgaggacgaacgtaattgttattatcaattgattcgcgatcgtgcagatatctttaaacaagaggcagcacaagtgggcttacctatgttgccatatcgaggtggtttctttattactataccaactgattctggtaccgctatttgtgaagaactaaaaaaagaacatatttattgcattgcgttaggcaatggtattcgtatcgctgcatgtggtattcctaaattccaaatgaagggattagctggaaaaatctatgatgcaatgaaacgattaggcaaattataaagaaatgaatttaaaaaggcacttcaatttgaagtgccttttagtgttagtgaatgtccttacgttctttaatttctttatctgcctctaacgctaagttttcaagcgcttttttaggtgctgttcgttcacctgttttaggatcaacaaattcaacgcgatctaaggtatctgtgatttgtcctttaataaagcctaaatagatgttatatagctctttcttttcggctaattcttcaggtgttagttcttgacctgattttttcttagctgctagttcatttatacgttttaatgtatcgttaatattggtcataattgcctcctgtattccatattagaataacataatttattataacatagaacttaatgaatacgtatggtaagatataaattgtacgagttcgtactttcacaggagagaaaggagtttatcgtgcgtgttacgaaagcaattaaggcagaacaattagcattattagaagagcattattttgatgctaaacctgctcttgaatacacaaatgaatttgaattattagtcgctgttgtgttatctgcacagtgcacagatgagagggttaacattgttacaaaacgattgttccctgcattaaatcatccggctaagatgctagaggttggtgttacaaaactagaagctcttatcaaggattgtggtttgtataaatcaaaggcgaagaatttgattgccacttgtcatatattggtagaacaatatcatggagaagtgccacgtgaatttgatcagctcgttgaattacccggtgtaggtcgaaaaacggcaaacgttgtggtatccgtattattcggaacaccagctattgcggtggatacacatgtattccgtgtagcaaaccgattgaaattaggtattgcaaagacgccagaagaaatggaacaaaaattgcaaaaggctataccaaaagagaagtggtctgcagctcatcattggctgatttatcatggacgacgtgtttgtaaagctcgtaagcctctatgtgaaacttgttttttacatcatctttgtccgtcagcaggaaaggtttaatatgaaaaagaataatgaagaactaattgccctttgtgctcaatatggcatagaaggtattgatatcatcaacgaattaatgcgttttaaagtattagatcaattgctctctagcaatgcgaattctcgtgaatggggtgttacaccagaggacttatatggattagctgagaaatctacagtggaatcctttggacctattccatatgatgtaaatacatttcgtgcattgtacggcccttcatttacggtagaactctttgattttattagtgatactggaattctagatggtcttgatgtaggaactatatgggaaacgcctgtacgtgaaagtatagaagctcatagcaaaacgggggaactcgtcttatatgcgtatgtagaagaatacgctggcatgatagatgaaattttacaatcttatgaggataaaaaggttgtcctctatacagcatctcccgtatgctatagcattatttctcgattgtatccaatggctcagattattaatcaatggcctcatcgtagctattttgaccatatctttacaggtactgttggtatgttccaatcttctgaagatattgtagaagaggtagcaaatggtttgcataatttagttccagaagggactgctcaattgttcttaccagcaacgatggcacaaaatcaattgggattgaataatatggcattacaattctttttgaaccaaaaacgtgtagaatctattcgtgaatggaccccacttggggcttatgaaatcatttatggtaaatatgatgttaaaaagatgcgcgtaggtcttcgtgaacgagttggtgatgactggaaagctattaattatattccattgcctcatggcgtctttgctcaattaccggtatttactgtattaaattacggtttgtcgttacgttctattttattgcctggcggtcaaactgatgtagctttagggcaagatggcatttattgtatagatagtcgtgtttcagaactaggacgtgcggcacttcgtgaaaatggagcgtattacttagcttttacccgctatagtgaccatgtagaggtgtctatgggtacagaagcacctagtacgggtgtatattggatgttccctgatgtagaattggcatatatgtggtatacatatttctctagcacaattgggcaaaccttaatgcaagagatttctatgctcgttcaaacagaagaatccttcggctatatgcttagcagcgtacgtcgccgtgtactcgatgtaaatgatgaatcgctactagttaatgcggccaaaaatattgatgaagcgtataaagagactatcaaatctgcacgagcatcatggcaagaaaatatgaattctttgggtgctgacgtaatgcctccgacgacatccatcgatattgaagactacagtgactataaaaaataattgtcaatataggtaatttggtttacaatatatcgtatcgatttagaactacataatttgacacatagtgtacactgtaattaggtgaggagggaggtaacaatggctgttattaatttcgaaattttcaaagttatcggcacattatcagaagataaagatggctggaaaaaacaacttacatgcacaagctgggggaaatataatcctaaatttgatcttcgtgcttgggatagcgaatatacaagtatgaaaaaagggattactctttccttggaagaattgattgcattacgcgatcttttgaatgaaagtgatttagaaactatcttagcggaagcaattgaagaaaaacaggcttctaaagagtagtttcttgatttgtacgcattatcgtgctataatctataagaataatattgattgctggaaagaggtgtatagaatgaaacaaggtattcatccagactataaagaagctacagttacttgtggttgtggtaacacattcaaaactggctctgtaaaagaagaccttcgtgtagacgtttgctccaaatgccatccgttcttcactggtcaacaacgtgcggctcaagctcgtggtcgtatcgaacaatttaacaaacgttacggtaaataatagtttatgtagcgaaacaactattggcagggctttgggctctgcctctatttgtttatgaaaggaaatcctttggcaaaagaacgtattaagaagttcgttggtggacaagctgtcattgaaggcgtcatgatgcgtggcccaggatatacggcgacagctgtacgtgagccttccggttctatcgtggtgcaaaaggaagccaccacgtccattcaagagcgatatcctatattaaagaaaccttttttacgaggctgtatagccttatatgaatctcttgttatcggtatgaaggccttgtccttctctgcgaaagcggctggtgatgaagaggaagaaatgtcgaatagtgaaattgccattaccatggtattttccacactatttgcaatcgctttatttgtggcccttcctacatttgtagttaaatttattcctggtattcaagataatcactttattttgaacctggttgaaggtgctattcgattggctttgtttttgctctatatatggggtattggtcaaactaaggatatacaacgtgtattccaataccatggagcagagcataaaaccattcatgcttatgaaaatgatctacctttgaccgtagaaaatgtgcgtgctcaatctcgtttacatccgagatgcgggactaattttctactcattgtaatggtagttagtatatttgtatttgcctttttaggttggcctaatttgctagagcgcattgtgtcacgtgttttactgatgcccgttgtagcaggtattgcctatgaatgtattcgttttgcaggacgtagtgaaagctcctttgtaaaatctttcgttaaaccgggcttggcgttgcaatatatgacaacccgtgaaccagaagcagatcaaatcgaagtggctattcgtgctctagaagaggtgcgtcctccagaagaagatgcttatgaagatgaaacatattaagattgaggttatatatgttagtagataaattacaagttattgaagataaatttatggatctagagcaacgcatcagtgaccctgaagtcattgcgcgtcaagatgaatggcgtaaactaacacgtcaacatgcccaattatctgaaactgtagaagcttttagagaatataaaaaggtgttagctggtattgatgaagccatggaagtcattgaggacaaaacgatggatgaagaattccgtgaaatggctcaagaagaattgaaagaattaaaacctcaaaaagaggaattagaagaaaaattacaaattcttttattaccaaaagaccctaacgatgataaaaatattatcatcgaaattcgcggtggcgctggtggcgatgaagcggcattgtttgcaggcgacttattccgtatgtatacaaaatatgctgaaagccaagggtggcgttgtgaaattatcgatgctaatgaacctgaactaggcggttttaaagaggttgtattctctgtagatggtgagaatgtatattccaagatgaaatttgaatctggtgtacatcgtgtacaacgggttccagctacagaaacacaaggccgtgtacatacatctacggttactgtggcagtacttcctgaaatggaagatgttgatattgaaatcaatgataaggatttgaaaatcgatacatatcgtgccagtggtgccggtggtcagcatattaataaaacagaatctgctgtccgtattacccacttaccaacaggtattgtcgtagcttgtcaggatcaacgttctcagttacaaaacagagaaaaagcgatgcgcgtattgcgtgcaaaattgcaagataaagcagaacaagaggctacagctagcatggctgcagaccgcaaaagccaagttggtacaggtgatcgtagtgaacgtattcgtacctataactacccacaaggccgcgtaacagatcatcgtatcaatttaacattgtataaattggatgccattttaaatggtgatctcgatgaaattattcaagccttaaatgccgctgatcaagcagctaaaatgcaggaggctaatacaaatgtataaggagatttggacgattggtcgtattctccagtggacagagcagtactttcaaagcaaggggatggatacacctcgtcttgatggggaagtactgctttctcatgttttagggaagaatcgtatatatctatatacgaattatgatcaaccattagagcaagaagaactggatcgatttaggccgcttgtcattgaacgggctaaaggatattctgtagcatctttaacaggaacaaaagattttatgggattgacatttgctgtaaatgataaggtcctcattcctcgtcctgatacagaaacattagtagaatatgtattaagtacgtatcatcaacaagacgctattcgtattcttgatatgtgtacgggccctggtactattttactaagcctcttacattatttgcctacagcaacggggatgggccttgatatttctcgtgatgcacttgaaatagccacaaagaatcaagaagcatttaagctagagaatcgtagcgaatttcacgaatcagatatgttttcttatttagaacatcataatgagttgtttgatgtgattgtatctaatccgccgtatattcgattagaggataagaaaatcctgtctcctgatgtacttaatgagcctcatattgcattatttggtggtgaagatggccttgatttctatcgtcagttagctatggagtgcgttacatatctaaaaccttatggacttgtggcctttgaggtaggatatgatcaggctgaagatgtaaaatctttactggagtctgttgggtcctatgtagatatatcttttgcagcagatttagcgggcattaatcgggttgtgacggctcgcgtgaaggggtgagaatgtggagactaaaatcattaccgaacttacaaaagagaatcttcaattagttgcatatgcgttgcgtcatggtgatgttgtagcaattcctacggaaaccgtatatggccttggtgctaatggcctcgatgcagatgcaatggataaaatttatgctgctaaaggtcgtccttcagataacccattaatattacatgtacccaatgcagaaagtattaaaccgcttgtgaaagaaatacctgaaacagcaaaggccttgattgaggctttttggccgggtcctttaacaattacattgcctaaatccgatctcgtgcctgaccgtgcaactggtgggttagctcgcgtggcattacgatgtccagatcatgctgtatgccgtaacatattagaattggccggtgtgcccattgcggcgcctagtgctaatatttcgggccgtccaagcccgactacggcacaatccgtttatgatgatatgaatggacgtattccttatattgtggatgctggaatctgtacgattggtgtggaatcaacggttgtagaggtaagagatgatggagtgaccatcttacggcccggtggaattacaaaagaaatgttagaacaagttgtagataatgtgtcttatgatccgtttttgtcgtctcaaaatgaagcgccaaaggctccgggtatgaagtataagcattatgctcccgatgcacctatgcgtgcatttataggaaatccaaaggatgtggcggaaactttcagtaatgtgattcgtgaacaggaaactaaacgtggtgcattcttggttagtcaagaaacatatgatttgttaaaagatagtgtacacggtgaatttcatgtatatggacatagtggtgatgcggttgcattagctcacgatttttataagacattacatcattttaatgaatgtgatgtagactatattttagcagaaggtgttgtgaatacaggcctcggcgtagcggtcatgaatcgcatggaaaaggcgtgtgctggtcatattatctatttataagcagttaggtaatatttgttatgtccattcataatagaaaaatgtctttacatattggatgtatttgctataatgtataaatagccacagaaattgtggcggtaaggatgtcattatgaatattttgtatgtatgtactggtaatacctgtcgtagcccaatggcagaaggtattacgcgaaccttggcaacagagcttggtctagatgtgaatgtagtttctgctggattatttgctgcttatggtgctaagcctacagaagaagctgtgattgcgattcaatctattgccgatatttctggccatgaatcaagacctcttacaatggagcttgtcaattcagcggatttgattattggtatgacacaagatcataaatctgtgttacttcgtcaatttccttttgaagtagctaaaattaaaacccttgctgaatgggggcatggtgcaggagatgtggtagatcctttcggttcaaatcaagacgtgtataatcaatgtgctgagcaaatttataatttggtgaaagctggattagtagcatcaaaagaataggagatagagctatgaaaattgctattggttgtgatcatggtggattacatttaaaacaagaaattaaggaattattgtctacattaggccatgaagtggaagattttggtacacatagtacagaatcttgtgattatccggatattgctgaaccagtggcacatgccgttgtagatggtgcagcagatcgaggcatcttaatctgtggtacaggcattgggattggtattgcagccaacaaaattgcaggtgtacgtgcagcgctttgtcacgatacattttccgcacatgcaagtcgcgaacataataatgccaatattcttacgatgggggaacgcgttattggaccgggccttgcaaaggatattgttacgatttggcttaatacagaatttgaaggcggacgtcacgcgcgtcgcgtagaaaaaatttctgctcttgaaaaataatacatctttattcaattagttatcacattatatttacatatgtttcaaggaggattcccatgagtttcttagcaaaacaagaccctaatgttaaagcagttatcgatcaagaattaatgcgtcaacgcgataaattagaaatgatcgcttctgaaaatatcgtatcccaagccgttatggaagctcaaggtagtgtattgactaataaatacgctgaaggctaccctggcaaacgttattatggtggttgcgaacatgtggacgtagtagaaacattggctattgaacgcgctaaacgtttatttggtgcagaacatgcaaatgtacaaccacattctgggtctcaagctaactttgctgtatattttgctatgttaaaacctggtgacactattgttggtatgaacttatcccatggtggtcacttaacacatggttctcctgtaaacgtatctggcacatatttcaatgttgttccttacggtgttaatgcagaaactcaacaaatcgactatgatgaattccgcaaaatcgtattagaagcaaaacctaaattgatcattgctgggggcagtgcttacagccgtcaaatcgacttcaagaaaatggctgatgtagctcatgaagtaggcgcgatttttatggtagatatggctcactttgctggccttgtagctgctggtttacatccaaatccagtagaatatgcagatatcgttacaactacaacacataagacattgcgtggccctcgtggcggtatgattttgtgcaaagaagaatatgcaaaagctattgataaagctgtattccctggtatccaaggtggtcctttgatgcatgttatcgctgcaaaagctgttgcattaggtgaagcattacaaccagaatttaaagtatacgctgaacaagttattaaaaatgcaaaagtattggctgctgaattgatagctaaaggtttgactatcgtttctggtggtacagatacacatgttatgcttgtagatgtgcgcaatacaggtttgactggtaaagaagcagaacatcttcttgatgaaatcggtatcacagctaataaaaatacaattccattcgatccagctagcccatttgtaactagtggtgttcgtttaggtacacctgcattgactacacgtggtcttaaagaagacgatatgaaagaaattgcagatattattgctacagtacttcaaaacccagaagatacagcaaaacatcaagatgctgcaaaacgcgtagctgcattatgtgaaaaatatcctttatatcctaacttataatttataggtatcggtatagtaagaacccaaaagggtgagtaagagtttttcttgctcaccctttttatgttgtagtggtcatatttatatggcaggatttgtaaatatgtgatagagtatgtatgaatagtaaaaggccgaaataatgatttcggattcggattgtttttatagggggcataatcatgaacgttaatgttatgacacatccattgattcatcataaggttacattgatgcgtgatgtacaaacaggttcaaaagatttccgtgaattattagatgaaattacattgttgatgggctatgaaattacacgcaatttgccattagaagatgtagaagtgcaaacaccattgactaagatgacaggtaaacgcattgccggcaaaaaattaggcattattccgattcttcgtgctggtcttggcatggtaaatggcatgcttagcttgattccaacagctaaggttggtcatgtcggtttatatcgtgatccagaaacattaaaaccagtagaatattattgcaaattacctagtgatgtaggcgaacgcgatttcatcgttacagatccaatgttagctactggtggtagtgcatctgcagcgattacgttattgaaagagaaaggtgcaaagagtattaaattgatgtgccttgtagcagcacctgaaggtgtagaggttgttaataaagaacatcctgatgtacctatttatgtagccgctcttgatgaaacattgaatgaacatggctatatcttacctggtttaggtgatgcaggggaccgtattttcggtacaaaataatcacgatatatgatagacatatatctataaatacgatgtaaaagacgcccgaaagggcgttttttacttgaataaagttgtaataaggtataaaataatcatgtagaagtatttttttattctaggtgggactaattttgtttgtctgggacgaatatcgttatccttatcaaagggtaaaggaggaaccctatgaatgagttgttaatggtatgcgagcgtatagcaccggaattaatgaccgtcttaaaggatcgctacaaattattgagtcatctagcctatgaagaacctcttggccgtaggagtttagcactagctacggatatatcagaacgtgcagtacgatctcatgttgatgcattacgtggtaacggattagttgaaatctctaaacctggtatctatctaagtgctgaaggacgagaactagttcccaaattaaggagtattctttatgaatatgagcgtgttggcgaattagagcaacggttgaaggcggtattacatattgatgatgttattatcacaccaagtgaaggatcattaatgttaaaacgcttaggttttactgctgcgaaagtggttcaacgtatggtaaccgatgagtctgttatagccgttagtggcggtagtaccatggcggcaatggctgatgaaatgcctagtagtgtgttgcatcccgtggttgtaccagcccgtggtggtgttggtgaagtcgtcgaatatcaagcgaatgtaatcgcctctgtattagcagaacgttggcatggctcatataagatgcttcatttaccagatgggctatctaaagattccctagatatgcttgtaacattagaaccacaaatcaaggagattagcgaattaatccatagaactgatatattagtttttggtattggtcaagcactccatatggccgatgtacgacatataccggaggatgtgcgccgtcaactcgttgatggcgatgccgtaggtgaagcattaggtcagtattgctctatggatggttctatcgtctatgcgacgaacaacatagggctttcattaagggatatagtaaatataccgcatgtcgtagctgtagcaggtggctttgataaagctggtgctattatcagcgttatgaggtcttgtaaaaagggaatcctcataatagatgaccaagcagcagaaggtatgcgccaattactaaatattcctgcgttataatttagtttattatttttagtattatatagttcttttgaggaggacaaaacaatggcagttaaagttggtattaatggtttcggtcgtattggtaaatgtgtagtacgtgcggcaattaataatccagatgttgaagtagtagctattaatgcgactggtgataatgagggtactgcattattgttaaaatacgattccgtacatggcacaatccctaatgaagtaacatttgacgatgaaaatatttatgtagatggcaaaaaaatccgcgtattccatgaccgtgatgcttctaaattgccttggtctgaagaaggcgtagaaatcgttatggaatgtactggtaaataccgcgatgcagaagaagcaaaggttcatttgaatcaacctactgttaagaaagtattgatttctgcacctggtaaaaatgaagacttaacaatggttatgggcgttaaccaagatatgtacgatcctgcaaaacatcacattatctctaatgcatcttgtacaactaactgcttggctccatttgctaaagtattatgtgatgaatttggtatcaaacgtggtatgatgactacaattcattcttatacaaatgaccaaaaaattcttgatgcacgtcataaagacccacgccgtgctcgtgcagccgctatgtctatcattcctacaacaactggtgcagcaaaggctgttgctaaagtattgcctcaattaaaaggtaaattagatggttttgcattgcgcgttcctacaccagatgtatccgctacagatcttgtttgcgaacttgaaaaacctgctacaaaagaagaaatcaacgaagcattccgcaaagcagcagctggtgaattaaaaggtattcttggtgtatccgatgtgccattggtatcctgtgactttagttctgatcctcgtagttccattgttgatgctgatttgacaatggttatggatggtaacatggtgaaagttgtttcttggtacgataacgaatggggctattctgaacgccttatcgatatggcagctttcgtagctagtaaaggtctataatgggaggaaattctaggatgaaattaaccattttagatatgaatgtagataataaacgcgtttttgtacgcgtagatttcaatgtgcctatgaaggatggtgtcatcactgatgacactcgcattcgtggtgcactagatacaatcaaatatttaatcgaccacaatgctaaggtcattcttgcatctcactttggtcgtccaaagggtgaacgtaaaccggatatgacattggctccttgtgctaaacgtttatctgaacttatcaataaaccagttgcatttgtagatgattgcgttggtcctaaggttgaggcagctgttgaagcattacaacctggcgatgtattgatgcttgaaaatttacgttaccacaatgaagaaactaaaaacgatcctgagtttgctaaacaattagcctctcttgctgatgtagctatcaatgatgcatttggtgtatctcatcgtaatgcagcatctgtagttggcattgctgattacatccctatgggtgcaggtttcttacttaaaaaagaaattgatgcactaagtgcagctgtagtacatccaaaaacacctatggctgccattatcggtggtgctaaggtaacagataaaatttctgttatttccaatctattacctaaggtagatgttatgattatcggcggcggtatggcgaatgctttcattaaggctcaaggctgtaacattggtagttctttatatgaagatggtcaagatgctatcgctacagatttagttatggaggcacgcgttgcaggtgctagattattgacacctatcgatgctgtagtggcagatgctttcagcaatgatgcgaacacaaaaatcgtggatgtcgataacatcgaagatggctggatgattttggatatcggtcctaaaacacgtgacttatatacagaagcattggctaatatgaaaactatcatttggaatggcccaatgggcgtatttgaaatggataattttgcagctggtacgaatgcagtagctaaagccgttgcagaatctgatgctatgactatcgttggtggtggtgattctgtagctgctattgaaaaaagcggcttagcagataaaattagccatatttcgactggtggcggtgcatcccttgaattattagaaggtaaggttttgccaggtattgctgctttaacagaggcctaatatgagaaaacaaattattgcaggaaactggaagatgaacggaaccattgcatctggttctatcttgattgaagcatttactagttttctaggtgataaaaacttggattgtgaagtagtagtttgtccaccctttactgcgcttgagagagctgtgtccttaacacgagatacacaggttggcgtaggggctcaaaatatggattatcatgatgccggtgcatttactggcgaagtttctccgttgatgttaacggaactcggtgtgtcctatgtcattattggccattccgaacgccgtgagtactatggtgaaacagatgctatggttaatgaaaagattaagagtgcatttcatcataatttgcaacctattgtctgtgttggtgaaagccttgctcagagagaggcaaatgaaacgatttctttcattcacggacaattacaatgtgcattacaagatattccagcggatcaagtggaacaattgattatcgcttatgaaccgatttgggctattggtacgggcaagactgcgactgctgatcaagcagaggaagtatgtaaatccattcgtgaatatattgctgaattatatacaccaaatgtggcggacttggttcgtattcaatatggtggtagtgtaaaggctaataatgcgcgtgaaattttaagtgaacctaatattgatggggccctcgttggaggcgcttcgttaatcgtggatgaatttaatgaaatcatcatggcggctcaagacgtaagtaaataacatactagaggtataaatatggcaaaattacaggcacccgtaatgctagtcatcctagatggctttggtatgggggaccaaacagatacgacgaatgccgtagtacaagcaaaaccaagttattttaattatttgtgggatacgtatcctcatacaacattacaagcttcaggtcttgcagtcggtttgccagaagggcaaatgggtaattcagaagttggacatctcaaccttggttccggccgtactgtatatcaagacttaacgcgtattacgaaggatgtagagagtggcgagttttttcaaaagcctgtaatacaacagttatacaagcatgctaagcatggtaaattgcaaattattggccttgtatctgatggcaatgtacattgttctttagagcatattaaggccgtaattgctggtgctaaacatgaaggcattaaagaagtatatgtgcatgcgcttctcgatggacgcgatgtgccaccacaatcagcattaacctatcttaaggatttagaatcctttatgtccgatataaactgtgggaaaattgctactgtaagtggtcgttactatgggatggatcgcgataaccggtgggaccgtgaggaattagcctataatgctattgtcaatggtgttggtaataaggctaattctgcgtgtgacgccgttacacaatcctataatgatggtgtgaatgatgaatttgtagtgcctacagttatcaatccaaacgggatgatttctgatggagatgccgttatattctgtaactttagacctgatagagctcgtgaattgacgaaggctttaatattacctgattttgaaggttttaaacgagaacctatatctatctttatggcgacaatgactaagtatgaagatggattacctgttcatatcgtctatgaaaaggatacgttacatcatacattaggtgaggtccttgctgatggaggctatcgtcaattacgtattgctgaaaccgagaaatacgcacatgtaacatatttctttaatggcggtaatgaggttccctttgaaggtgaagaccgcattcttgtgccttctccagcagtggcaacctacgatttgcaacctgaaatgagtgctcctgaggtaaccgataaggtagttgatgctattcatagtggtcaatacgatatgattatcctaaattatgcaaatccggatatggtaggtcatacaggcgattttaaagctgcagtgaaagcaattcaaactgtggatgcaggattagaacgtattgcaaaggctatattagaggttggaggacagcttttagttaccgccgatcatggtaatgcagagcaaatggtcaatcatgagactggaaaacctcatacagcccatacaacgaatgttgtgccattgattttagtgggagctcagaatatacataagcaacttaaatcaggtaaattatgtgatattgcaccgacaatgttagcgttggctcatattgataagccaagtaatatgaccggtgaaagtttgttattagattaatttagtatataaataagaggtagtattatggcagtaattgaacaagtcgtagctcgtgaaattttggattctcgtggtaatcctacagtagaagtagaagtatgtttggaagatggtacaattgcaacagctgcagttccttctggtgcatctacagggatgtttgaagcagtagaacttcgcgatggcgataaaaaacgctatggtggcaaaggtgttttacaagctgtagacaatgtaaacgctaaaattggtccagctattatcggctatgatgcgactgaacaagtggcgattgataatttaatgcttaaacttgatggcacagataataaagctaacttgggggccaatgcaattttaggtgtatctatggctgtagcacgagctgctgctgaatctttagatttgcctttgttcttgtatctaggtggttttaatgctaaagaacttcctgttcctatgatgaacattctaaatggtggtgctcatgctgataataatgtagaccttcaagagtttatgattatgccagtaggggccaaaacatttagcgatgcattgcgtagctgtgcagaagtatatcatacattgaaatccgtgcttcacgataaaggtctcagcactgctgtaggcgatgaaggcggttttgcaccaaacttggcatctaatgaagaagcgttagaagtaatctgcgaagctattcaacgtgccggttatgaacttggtacagattttaaattagctctcgatgtggcttccagtgaaatctataaagatggtaaatatcatctagaaggcgaaggcaaagtattgagcgctagcgaaatggttgacttctatgaatacttagtcgataaatatcctatcatatctatcgaagatggccttgctgaagaagattgggatggttggaaagtattaaccgaacgccttggtaagcgcgttcaacttgtaggtgatgatttattcgttactaatacaaaacgccttgaaaagggtatcgaccttggcgtagctaattccattcttgtaaaagtaaatcaaattggcacattaacagaagcctttgacgctatggaaacagcaaaacgcgctggttacacatgcgtagtatctcatcgctcaggcgaaacagaagatacatttattgcagatattgcagtggctgttaatgcgggccaaattaaaacaggtgctcctgctcgttctgaacgtgttgctaaatataatcaattccttcgcatcgaagaaatgttatatgaaactgcacaatataaaggcgatgcagtattctataatttgaaaaaatagaataatacattttattttagaatcacatactagataagagactcttttgagtagtgaaaactcaagagagtctctttttttgttgtttttttgcgtacctgtacacgcattgtggattttttagaaataaagaggagtttttcttattatacagaattacatagtgcaatgagcagaggtgatgtataaacacaccgcaaggtatgaaggagggggtgacattgtatgtagatgttgcattagattcaatcattacatatgccattacgattagtgctagtgatatacattttgatcctattccggatggcgtacaagtgcgattgagaattgatggattattaacggattatatgtttatcgatgctactgatgcggaaatgattgtgaaccgcatcaaggtattcagtggcatggatattagcgaaaagagattgcctcaagatgggcgatgggaatggacagctaaatcgtatgctgtcaccatgcgtgtatctagtttgcctagtctatatggtgaggccatcgtgtgtcgcctaatgggaaatgaaggggtgcacaaaaatctattagaactgggtatgtcagtcgatttacaggagaagattaccgcattactaaaacgaccctatggtctcattaccatttgtggacctacgggaagtggtaaaacggctaccttatatgccatgttacgcatgttgaatttaaaggaaacaaaacttatatgtttagaggatcctgtagaagcggccattgatggagccattcaaatagggattaatgaaaagattggatttaccttttcgaaagggttacgcactgtattacggcaagatcctgactctattatgattggtgaaatacgagaccatgagacggcacagctagctgtaaaagccgctttaaccggacatcgtgtaattaccacggttcatacgaataccgcactaggtgttattggacgccttattgatatgggagttgaaccatatttattacatgctacgttaattggctcactatcgcagcgtcttgtaagacgtattaatagcactacaaattcttatcaagggcgattaggtttgtttgaatatgtagagataccatctagtgatattgattggaatcatgttgatacatatctatatgtttcattgcaagattcggcgcagactgctattaattcgggcattacaacagtagaggaggtacatcgtgcaggcatcttattgtgattgtgtagtgacaaccgactcgatgataacaatagaagatgtaatttccttatcgttagagcatagtgctactgatatacatttagaggtgggaacaccgatttatattcgagctgctaatgggttggaatctatttcaagcatttgcagtgtggatatgattaaagatgtattacaacgatgtggcgtcacacatgatgaatggcactctgtagataatgctttcaccagcaatggcattcgaattcgggctcatatttatagagctaatcatagaatttgtggaacattgagattactctgtcatgctaatttatcgcttgatacatctaaagatagtgatgtattaaaacaaatttgtgaatatcatgatgggttagtccttgttacaggccctacaggtagtggcaaatcatataccttagcttgttgcatagaatatataaataaaactatgaataaacacataataacgttagaagatcctgtggaatatgagttcataccattgcagtcaattattcatcagcgccaactcggaattgatgtggattcgatggcgcatgggatacgtgatgccttacgagaggatccagatgtcattatggtaggagagttgagagatcgagatacgttagaggccgcattacatgctgcagaaacaggtcatcttgtgcttgcaaccatgcatacacaacgagcagttatggccgtgcaacgtatgatatctttatttcctggtgaacaacaagatgaagtgcgcagtcaagtatcacaagtattgcgtgcggtcatatgtcaacgattactacgatgggaaacctcgtttataacaatacgggatattctgttaaatacgaatgcagtggcaaatctaattagaaatcgaaaggaacctcaaattgtttcaatccaagaaacgcaggcccccatgaagacattagaaatggcagtgcgtgatgtaaaaacacaatatggatcagttcaccaattacatgctttattggaacaacaattatcatagaggaattacatgaatgcttatgaatatacagcgataacaacagacaagaaaagaatacaaggcctattatgggccgattctgaggatgaggttagcactaaactcaagttagaaggatatgtcatttgtagtatagctagatcctctagcaaatcggtacgttggaatcataaacaagtgagtaccacagcatatcaactgggattactgctccaatcaggtatttcccttaggcgttcgctagaacttttaatggatggctcgaaaacgatgttatatcgctctttatacgaggggatacaacgaggccaacctttatcagaggctcttcgagaaaagggatttcctcctatagcattggcattacttgaaagtggtgaaatgtcagggaatgttggggaagctttgcagtatatagcttcttattatgaacgagaacgaaaataccaacaaaagatagtaagtgctatttcatatcctctattcttacttgtgcttatgaatgtattttttttggttactatattatttattattccatcgtttacccgcgtatttgctactatgcatatagaattaccatggatgacaaaaggtttatttgtattaggaacttcccttcgagaacatccattactgtatattagtgggcatgtggtttttattggaatactcatatatgcttttaaacaatctgcaattagatatagatttgatagatggttatggcagttggctcaacataatacatttttaacatctctatattacacgaatattttacatatttggtcattattgttagattcgggaatttcaattatcaatactatagatattacaaagcatatatggcgaaattcgtatggtgaatcctgtagtaatcaagtttatgacatgctttgtaaaggacattctttttgtgaaagtttaaaatcatcgtctgtagggaacccatttatatggcaaatggtcgctgttggagaagaaagtggtgaattggtagccatgttgaatcattgtagtcactattatgaatcgttgttaacacaatatatagcaagaatggagcgccttatggaacctatactcctcaccattatgggcgttggcattgcaatcctcgttatatccgtcatgtatccattatttacatcaatatcatctctaggtggtcaatgaaaggagactttttaaaatgcttatgtattgtagagaactattaatccgattagaacgatcgttttttagatatattagtttgcgtcgcatgcaacgaactaaacaaggtggatttacactggtagaacttatggtggtagtagctgttattgctattttggcagctattgcaatgcctcaatttatgtccgctgccgataaggcaaagaatgctaaacaagtggcagatatgcaaatcatacgtaatgcgacacaactctacatgattgataaaagtttagatacgccaccaacagtagaaaaattatatcaagaaggctacttaacggagcatgttaaaactacaaaaggtaaggaatatgttattacctatgaacaagttgctggtaatgccggtaagtctgtagtcgttacggcccctgaaacataaaggattttgcaatgaaagggagaaaggaatatatctgtttagttatatggatattgtcaattgtaattccattaatgtataggcattacacactatttgaaattatatgttatagcttcttttcactatttctcgtaataggtgctaccattgataagctatatttcatattacccgatgagggtgctatcgctcttacaattataggtatcctttatagcatcgttgaacagcatgcagttttcgacacctgtgtacatgttttgatcgttgctagtatcagtattgcattacgcatattgagtcgaggtggtcttggttggggcgatattaaatggatgagtgctatatccatatggctaacaaatatacaaattatagttatgatttacgtttcttgttttgctagtgtcctctatctcgccagcttatatagtattcgtaatacaggtagacggtatattccttttggccctttcttatgcattggtgcatggagtgctttgcattttgctaatgtatgggaggcgatatattggtcggtgataaaacacattattgtaatggctctatattagtagagtggcttgtggcgattaccattctactatccttgattggtataggcctaagtagtatcgttaccataccatcacgtcatgagttgaatagaagtactgaagaagtcgtattagctattaagaaggttcaactatgggctatgttaggacaccgggatgagcggatggcacagggtgagtttattttaaagaaacattcttattcaattcaagaagggcttatgcagcatcatgtagagatagaattaccagaacatatagaaagtgctcatactatgaagcgcgtttatttttctgcttatggattgccttatgatgggacagaatttattttacaagacttacaaaccggtgcgacaaatcgcatatggatctctgtacaaacagggcgtattcggtgggaatcattgtgattatgacatgtgtacaaataagaacgtattcaaactacaaacatagattacgaacagaacaatctggatttttatatggtgatgcccttatggcagtaaccttagtattactcatattgccgatcatactttatgtcttgagtagtaccttatcgatagtaaagactacgtatactcatgactatatattgcaggattcattatcttatatagaagcagggaaagcggtatatgattctggtggtataccaacaacaggaactatctcatcattgaatggacataatttatccaatataacatttaaacaaagtgttacagaagaagtggtaaatggtgtatctatactacgatttagcgtacaagctgttgataatggagttactgtttatgagatatctacgtttcttggatcgagtcatcattgaaaatcataggataaaatcattcaatggatttatattaccatctctacttattagcgttttgattagttctttcgtgattctcgtaatcatgacaatatgtatgacgtgttatatatggaccgagcgaattgatgatagcctggccatgttagaggatggccgttatacaagacgcgctatcgtatctcatattatttggaatcattctatggtatccatcaatgatcagggagacctgttatctatcaatgatacaagccgtaccgcgtttaccgttactagaagggccttatatagaaaattaagtgatggtagcttacaacccttgagtggaagccgcatcataggcactgatgataagcgtaaactggatgctaccaaaccattttctatgaatcctaatagactagtgactcttaagtggtctataaataaccggtttaatagtcaaacagagtatgcaaaagggtatggaggcatagcacagtatgaggtggcaacggcggtatcaacacattcagattggtttaaaaaaacgaagcatctctgactattcttctggcatggttagctatgtagccatatatattatgctcattttattagtacttattttaggaatgaataggcttgcgaccctgtcactaagtaatacaacggatgaaatgagacttattgcatctcattatgcagcagagcgtggtgcacgatggttctgtacgtattgcaataacggtggccattgggattatagcgaggctattgatgtggaaaaaaacgatactatctatatatatattaaggcagatccaaaggttactaatccaaaacatgtgatgagttgtgctgtattagatggtgtatcaagtcgtgttcacatatatgtaaaagaaaaagaaaatcatacattagaggttattagtgtaaaaccatattaaggaggacatcactatgaaagagaaaaaacagatacatacagggctttgtattacggatgatagaattgttgccactacagcacatattgaaaataaaacaatgattattactgatgcaatggagatgaaacggtctagcacaattgatgaagatatagctgaatttattaatacctataatctagaagagggtgaatatagtattgtcgcttgtatacctacagagatgacgatggctagttttgatcctcatgattttgatgtaaaggagtttataaagtggaatatagaagatacatttaattttggcgaacatgaatttgaacttgatgcttgtcgtagagagtatccacgacataattattatttgtttttagccgccgtagaccggcatgaacttgaattactacgccaaggtatacgtgatacatgtgcacctgtcgatactattgattgttggccattaccagttacgtatggattgatgcatagaacaggaacggttacgggtatcgtagaaccagccggtatgcatttatgggcttggtggaaggatacttgtgtgaaggaatgtattgtaaagataaatggtgcagatattagttccgcattgattgaaatggaagaaatgttgcagcgatttggcgtagaagaaattcaaggtatacatttttataatattgatgatttaaatgaagagcagcgtatcgatataagcgcattacaagaggtatacggaaataccgaatatatacctatgatgtttcttggacgaggtcgcacgcgttgcacattaggtgaattagattgggatatggcgattggaatggctacgcgggggttacggtggattggacaaggatggtaatgaaagattaataaattttatgccccgttcattacgatggtatatttggctatgtaaatataagttgtatatatatgctactgcaggagtgattatattactcagtgctttttgtcttggtatgggggtctattcttataaaacttatactgaacaggtagcgaagtacgaacaaatacagatggatgaacaatctaagcaaatacgggatcaatatcatgctatggaggataccatgtcgcggttattacaacatggcgcacaattagacaatcaatattgtcttgttacattattggatggagctatgtcaacaagaggaaccattacgttacgacatatagaattttctgatggaggatttactgttgatggtaatgcaacaaatgatgaagcctatcattcgtatgttcaatatgttcaagctcatatgaaacaggtgatttgtgatgggaaacaacaagtggaaaaagcagatggaccttgttcattccatttggatggacatacaaaacagcatgacaccaaacctaaggaggatattcctagcgtgtagtataagcattataattgctttttcttcgttatggatatctagatactatacagagcaatatgaagcggtggtagagaatattgaatattaccaattggaaacaacagtaaaagagcaatttttatcttctcatacatatgagttgatttcatccttattgctgcatgaatattgggtagatgatatatatcaaagtataaatagagaacctttaattataacgagtagttctcatcatgatgatgtattagatctgactctggttggaaccagtcagtcctttttatcttggtataatatggtgcaacagaagataaagtattgttatatacaaattatttctattgatacaaaaggagatagtatattctttacatgcaaggttacgccattagtgatgtaaagaaaatgaacatacaataatgagtaataattctcattattgtatgttcatttttgtttttatgccaattttatagtaaaataaattttaacgtaagaataaggggcaatagtaacatgatagtaaaacgaaatattattctcattgggtccatgggaagtggaaaaagccattttggacgtaatctagcagatttaaaaggatggcaattcgtggataccgatcgagtattggaaggtcgttttgggttgcccattgcagaaatttataaaaagattggcgaaaaagcatttcgtcgtgctgaattagaggttctaaaaaaagtttccctatatcacgaggcggttattagtgtaggtggaaattttcctatagagcatagaacgcttagatcgcttaagaaattttcttttattataggtatacgagcggcacaataccgaattgtaagccgcgtcaatcgtcgtgtgggcaaacgaccaacgatggattataccaatgtttctgcctttgttcataatatgattcaggcatggaagccagtatataaacagtgtgattatgtattggatacgactaatggacgtacctatgattttatgaaagcaattgagcgtcaattggatgctataggtgttcaatttaaggcgcgaagacaacccaaaacaactgaaattatgtctaaagacatacaagctgaaccaaagcagcagaagggaaatagacatgaaaaaaatagcattactaacaagcggcggagacgcaccaggaatgaacgcagccattcgcgccatcacaagaaaagcaatccatgagggctttagcgtatatggtatagaacgaggatttgagggcattattaatagtgaaataaggcctttacacgctcgtgatgtgggcggtattattaccactggcggtacaattcttagaacggctcgctatccagagtttaaaaatttagatgtgcagcaacgagcctatcgaatattacaagattttggtatcgatcatttaatcgttattggcggtgatggatcacaagctggtgcagaggctctgatgtggctcggtcaatctacgataaccattccttgtaccatagataacgatatgaatggtactcaatatacgattggttttgacaccgcacttaatactgtagttgatgcggtaggacgtattcgcgatacatcaaactctcatgaacgagtggctataatcgaagttatggggcgtcatgcgggacacattgcattacaagctgggttggcgagtggtgcagagcttgtattagtacctgaatacccaatgccattagatgaggtatgtgaacatattaataagactcatcagttaggtaaagaatatagtattatactcgttgctgaaggggcctactctagtggtgaggttaaagagtatattaaacaacatacatactttgatccgagtttaacagttctaggctatttacaacgcggcggtgcaccatccgcattagatgccattttagctgctcgtatgagtgagttggcagtggattgcttagtacgtggagagcataattgtattactgggtatgttgatggtcagattcgagctataccctatgaaaacgctaaaacaatgaagtttggcattgataaaagtcagtatgaattaatctctatattgagtcattgatgtaaaattatattgtataaacgataattttttagtacaatgtaatgcaagaaaatggaatgactcatttattaaggagtatatatgaaagaattatttcagaagcaccgtaaacgtattattggtggtgttattgctatctgtttattaggtggtggtggctattattatgttcatacaaatgatagtgcacagacccagcagaaatataccacaggtagggttgaaaagggcgatgtaaagactagtattagtgctacgggtaccattaatcctgttaattatgtggacgtatctactaatgtagcgggtaaacttgaaaaggtattggtcaaggaaaatgatcatgttacgcaaggtcaaattatcgcctatattgatacacgacaattacaagctcaggtcgataatgcaaaggctgctcttgataaagcacgcttagatatgaatcgttataaagcgctaattgatcaaaatgccgtagcagcgcaaacttatgatgatgctgtgaccgcatatgaacaagctcaatctacatatgatagagtatctgctgacttaagtgatgctactattactgcacctatgtcgggtaccgtagtagggacacctcttaaggcaggccaaacgattagtaccggtatttcgacacagatgatcattgcgactattgcagatttgtctgatttagaaatttatttgacagttgatgaaactgatattggcaatgtaaaaaatggatctaaggtagaatttactgttgactctaaaccaggtcaaactttcacaggctatgtatctgaaattgcaaaaggtactaaagggaatatgggtgttacaagtaatagcgtagtgtattatactgtgaaagtatcgattccagctgatatttcctcgaatttcttgccatctatgaccgcacgtgccacaatctttggcgatgatattaagaatacccttgttgtaccattaacagcggtacgtactgataaacaaggtgaatatgtatatgtcatcaaagatggtcaacctgttagaactgctgtatcaacaggtgtaacgggtgatacaaatgttcaaatcttaagcggcgtttccgaaggtgatgaaattattgttagtggtgatgtaacgagccctaagaataactctcatggaccattttaagcgtaggtgaactatgaatcagtcagttattgatattcaaggtattacaaagacctatgtaaatggtaagttaacggttcccgttctacatggtatagatttacaggtacaaaaaggtgatttcgtgtctatcatggggccttctggttctggtaagtctacctttatgaacattttaggttgcttagatagacctacatcgggatcctatcgcttgaatggtaatgaagtagctaatctcagtgatgatgagttagcgtacgtacgtaacaaagaaattggctttgtatttcaaagctttaatctattaacgaaattaacggctattgaaaatgtggccttgcccatggtttatgcaggcatcgataaaaaaacacgtactgctcgtgcagaggctttgcttacatctgtaggcttgggtgaccgtatggatcacttaccggcagaactatctggtggtcaacgtcaacgtgtggcgattgctcgtgcattggccaatgaccctgctatcattatggccgatgaaccgacagggaatttggattcgaaatcgacgattgatgttatgaacatttttagaggcctttatgatgaaggtcgtaccataattcttgttactcatgaacctgaaattgcaacctatgcaagtcgcaatgtagtgttacgggatggattaattgtagaagacaagaagaacttaaatatgactcctgttcaggaggtgacacatgtataaagaaagtttcttaatggcctgggcatcgttgattgccaataaaatgagatccattttaacgatgctaggtattattattggtgtagctgctgttattgcccttgtgtcaattgggaatggtgtaaagcaggatgttcagaactccatttctagtttaggttccaatctattgatggttatgcctggtgctccacgtacaccgggtgtgcgtccatcacaggggtcaatgaaatccttgaaggtttctgattatcaagctattagcaaattagatggcgtcaaggcagcaagtccatatacagctaattcttatgtaactatataccaaagtaagaactggactactactgttagtggtgtaagtagtaactttcaagatgtaaataattggaccatggctgaaggtcgatttatatctagcaagaatgtagaaaatcgtgaacgcgtagctgttgttggacaaaccgtagttaagaacttatttgctggtgaggacccagtgggtaaggaaattcgtgttaaaaatattccgttccgagttatcggtgttcttaacagtaaagggaatggtactatggggaatgaccaagatgatgtcatttttattccctatacaacggctatggaacgtgtagaaggtgttgactatcttcgtatggtctacgtcgttgctagtgacgataatggtattgaccgtttacaatcggatatagaaaatctattgcgcgttcgtcatagtattaaagatacaaaccttgatgacttcaacattcagaatatgaaatcaattatggaaacgatggagcagaccacaggaaccttgacattgttcttaggtgctgtggcggccatttcccttgttgtaggcggcattgggattatgaatatcatgctcgtttccgttaccgaacggactcgtgaaattggtattcgtaaggccttaggtgctacatactttgtcattgttacacaattcttaatcgaagctgttgtaatcagtctcatgggggggctcataggcattgctctcggtataggtgcgtcaaaactgataggattggcatctggtatgagtacggttatttcggtaccgactatcgtgttatcctttgcattctccatggctatcggtttggtattcggtatttatcctgcgcgaaaagcggctaaattgaatccaattgatgcgttacactatgaatagtattggtagatgcggatatttgggcaatctcacatttatataatgtaatagacatattcgcatacagtgcgttgcatgatacaattaagtatgatgtaacgcactatttttaatttagtgaggaaattatggcaacaacattattggaatattttaatgaattacgtacacagaatcctttttcctgggtaaaagattctgaggtgacaactgtagaacctggtcatgcagaaatgacgttacaaacaaatgaaacagagtactgcaattttaggggccatttgcatggtgctgtttgtattggatttgcagatagcttgatgggaacggcgtgctttacactaggaaaatcggtgagtaccattgatattaatggtaactatttgaaagctgtcaaaggtggcacagtattgcgtggtgtagcgaatgtggaacacagtggtaaaactacgatggtggctactgcgcgtatttataacgagttaggtgaagtggtacatatagcaagaggtacgttttttgtggtagaagagcgtcctttacctgatttaccttggcgattcattgaagaagacgacccaaatttgatataatgggggatgaactttgaaatttaggaggactgttgtatggaacaagaattacaacgcataaaagaggtagcgttaacagctatcaaagctgccactaatcaacaagcgttgcaagatgtacgcgtaaaatatttaggtaaaaaaggtgaagtaacagctttattaaaaggcttgggtaaactatccccagaggaacgccctaagatgggtgcttttgtgaatgctgtacgagaaacattagaagcagaactcgataaaatcaagtcctctatggaaacagcagctatgaacgctcgtttagaagaggaaaaaatcgatatcactctacctggtagagctccaaaaacaggtcatattcatcctttgactactgttaatgaaatgattgaagatttctttatgaaaatgggctacaccgtagaagaaggtcctgaagtggaacaagactattacaatttcgaatgtcttaatctaccaaaagaccatcctgcacgcgacatgcaagattctttctatattacagaaaatttcttgcttagaactcatacatctcctgtacaagcacgtaccatgcagcgtcatgaacctaatagtccaattcgcatgattgcacctggtaaagtatatcgttgggactatgatgctacgcattctcctgtgttccatcaagtagaaggtttgattattgatgaacatattacattcgctgatttgaaaggaactatcgaaactttcctacgtcatatgtttggcgatgacacaaaggtacgtttccgtacaagcttcttcccattcacagaaccatctgcagaggttgatatttcctgtgtaatgtgcggtggcgaaggctgccgcgtatgctctcatacaggttggttagaaattcttggttgtggtatggtacatcctcgtgtgcttgagctcaatggctatgatcctaataaggtgaaaggctttgcctttggtatgggcgtagaacgtattgctatgttgttatacggcattggtgacttgcgtctattctttgaagatgatatccgtttcttggaacagttttaggaggtagaaatgaaagcaagcttacaatggatgaatgaatatgtacctcttgatctaaatcgtcctgcccaagaattagcggatgaattaacacaagcaggtattcctgtagaagaagtactttctatggatccaggtttgaaaaaaatctatactggtaaaatcgtagaaattacaaaacacccagatgcagataaattacaagtatgccaagtacaatgcttatctgaagatggggaagaaattactaagcaaatcgttaccgctgctacgaatgtggctgttggtcaaatcgtaccagttgcgtatcataaatctcgtttggcagatggtacagaaatcaaaaaaggtaaattacgtggtgttgtatcagaaggcatgttctgctccgttgctgaattcggtatttcctctgatttggtaagaccagaagaagcacaaggcatctatattttccctgaaggtacaccaattggtttagatattaaagaagcacttatgcttgatgatactgtatatgaatttgaattgacagctaatcgtgcagactgcttctctatggtaggtttgtcccgtgaattcggtatcatgacaaatcaaaaggctttattcccagttattatggtgaatgaaaatggtgagtctatcgaaggtaaagcatctgtagctatcgaagcacatgatctttgcacgcgatttacatcccgtcttgttacgaatgttaccatcgaaccatctccattgtggatgcaaaatcgtttgcgtaacagcggcattcgccctattaacaatgtagtggacgtaacaaactacgttatgcttgaattaggtcaaccaatgcatgcttatgattatgattgtgtagcggaccatacccttattgcacgtcgtgcaaaagctggtgaaacacttactacgctagacggtaatgaacgtgaactcaatgagtccatgcttatcattgccgatacaaagggcccaatcggcgtagctggcgttatgggtggtcttactagtgaagtaacagataaaactacgaacgtcttgttcgaagctgctgtatttaatggaccatctattcgtcgtacatccaaagcattaggtatgcgttccgaagcatctggtcgttttgaacgcggtgtaaaccataaatatacagcatatgctatcgatcgtgctgcacaattgttacaacaaatctgtccttcttgtaaggtgagtgttggcgttattgatgtatatccagaaccagtagaacaacgcactgtaactttcacagcagaacaaatcaatgactatcttggcacttctattgaaaaagatagaatggtagatattttaacgaagctcgaattcggcattacagaatctggcgatactattgaagcactcgttccaacatggcgtgatgatgtgactgttatgcctgatattgctgaagaagtagcgcgcatcgtaagctatgataatattgcgcctacaattcctgtagcgatactatcctccggcggtatgacacctaagaaagcgttaacaaaagaagtaacgcattacttagcacatgcaggtcttagccaaatcattacatttagtttcatgcacaaagatggccttacgaatatgatgttaccagaaggtgataatcgttatacggcaattccaatcttaaatcctatttctgaagagttcccatatatgagaactacgttggtgccagctgttattgaagcagctaaacgcaatattgcacaacaaaacaaagatttgtggttatttgaaacggctaatgtatatgaaccaaagtcattgccattaacagaagtaccgcatgaacgccctatggcatgtggtattatgatgggtaaggttacagaggccgcatggaaccaagcgcaacgcgatactgatttctatgatgtaaaaggtgtagttgacggtttactagctaaattaggattgactcaatataatattcaaccatctagtgaaagctattaccatccaggcgtaagtgcacattacacagtcaatggtgtaacgattgctaactatggtgaattacatccacaagtggttaaaaacttcgatttgtctggtaaagtgtatatgtttgaaatcgatttggaagctgttttatccattacagtaccgccatttagatatcaatcattcagtaaattcccaggtacaagtcgtgacttggctattgtagcaccagtatctgttacaagtggtgacattgtagcgcttattaaggaacatggcggagaatacttagaatccgtatctatcttcgacgtttacgaaggggaacatattgaagcgggctatcgtagcttagcttataatttacaatttagatcgatggaaggcacattaaatgatgaagacattgatggtgcaattcaagcgattattgatgcattagcaactaaaaattgtaaattacgataaatcatcgtgaaagggtttaccttatggtagacccttttatgtctatctatcccctgttgtataatagaaggtataggtaatgagtcagaaaggatttattatggaattattagcaccagcgggtacgatggaaaattttatggctgccttggaatctggggcggatgctatatacttagggggcaaggtctttaatgcacgggctcatgcagccaactttggcattgatgagctgcgtgaagctgtgcgattggcgcatattctagatgtgtctgtatatgtaaccgttaatattttaattggagacactgaactaggggagcttgaaaattatcttaaggatttagactctattggtgtagatgccatcatcgtgcaggacttagcagttgcagaaattgcaaaacgtgttgcaccaaacatccatcttcacggtagtacacaaatgacggctgctacactagatgcggttcggttttacgaaagtttaggctttactcgcgttgtattggctcgtgaattaagtcttaaggaaattcaacatatatgcaaacattgtaaggcagaaattgaagtatttgtacatggtgcattatgtgtatgttactcaggtcaatgtttgatgagttctttcatcggtggccgcagtggtaatcgaggtgcttgtgcacagccttgccgcttaccttatgaattattggattctaagggtgaaagtgtgttacctaaacatgaagcctatttgttgagtccaaaggatcttaactacagcgagcatatgaatgaacttgtagcggctggtgttacatcctttaaggtagaaggtcgtatgaaaaaggtttcctatgtacgtcaagtgataggcacatatagagaaatattggataaggcgtccattcaagaaaatcaacgtaaagcactagcctctggatttaatcgtggattttccacagcctatttagaagatacggtaggtcgacaaatgatgaccgtagtggcgccaaatcaccagggtaagccaatcggcgaatcgtatacgaaaaaaggggaagtttacttatccttaacagaacctattgaacaaggttcattagttaaaatattacaatctaatggcagtgttacctattatacggtagatgacgaatggacatgtgtatccgatacgctgtataaagggcgaccagcagagggcttagcagtaggtcaattatatttagcatctacaccaaagaatacaaagtcacgaggcttacaagagtttacccgtaaatatgatatgtctgtatatctcagtgttggttctaatggtgaaacaaattatactgaattaactgccatcctagactctggccttagtgtgactgttacaaatgagtatgtgccagctattgctaataaagtgcccacatcgttagagaaggtaacagaacagttaggtcggttaggtaatacgttatttaggctttcttatgtagatattcctgatggcccttatatgtggcctgctagcgttcttaatgcactacgtcgtgatgctgtaactgcattagaaacagcgttaattacacatcatgtagaatcatggcaagcattgcaagtaacaggcgatgtagattatgatttcaaggcgcaacacgagttatcctatgatacttgtcctatgatttcagctcgtgtcgatgaaatagaaggtgtgaaagcagcaatttctggtggagcacaaaaaatcgtttttggtggtgatagactgagtcgtataccatatgcgttatctatatatgatgaggtagcccgtttatgtgctcaatctgatgtgatttgcacctttgctacaccacgagttgtgaaagatgatgaagtagaagcatataaacatacattagaggcaatcgtacaggctcatccagatagtatttccattcacgtgccacaagcattattatggctccgtgaattaggatatacaggtgccattgaggctgatacaggacttaatattttcaatacacctacattgcatttctgggaacagttacatataagttgtgtaaatccatcgcaagagttgaccttaaaacaaattacggaactagctaaacatagtcacgttcctattgagacgatgatacatggctatacggaaatgatgatttccgaatattgtgctattgcaagttttgttggcacaggtagtaaagtaaattgtcctatgccatgtgttaaggaatcgtattcgttaaaggatagaaaaggtgaaatattcccaattcgtacggatccatactgtcgtatgcacatcatgaatagtcatgaaatggatatgcgagcctatgtacctatgttattacaaaaaggaatttccatattacgcatagatggtcgtcatatgaaaccaaattatgtgcaagatattgtatctcaatacgtatctatagctaatggtactattgatgcccctcctaagaaggttgattcccaaggcgaatctattacacggggccattattttagaggtattttatagaacgaggtagtacattgtttaatgaagatgtattagattttataaaaattaaagaagagttggctagtcattgtagctctattattgctaaagaaatggctttagcattagaacctatgacgaatcgagaaaagattcaagaggctttagatgaaacagcagaagcactgcgctcttggcaaacagaaatcgagcaacctttaggggggactcgagatatacgtgaatcttgtaaaaagagtcgtaaggattttgtgctttcacgagaagccatatgggatgtatatataactataggcgcctataagcgtatggcgaagttctttagagcgaagtatatggaatacccattattgtctttatggatgcaagacatgccgaatatggaccgtgtggaacaacggttaaaacgtgtatttgatgaaaaaggggaactgctcgatacagcatctcctaaattggcgagcctacggaatacgattagtaagacgcgagatcgtattaaacacgatattcaagccatattgcatgacaaggataatcagaaatatttccaagaagcgattattacgcaacgcaacaatcgttatgtaattcctgttaagcaagaatatcgccaatattttgatggtttaattcacgatcgatctgcaacagggcaaacattatatattgaaccgatgcgacttgtacagctaaataatgatttgcaagaagctttaattggtgaggagcaagaggtattacgcatttataaggaactttcagcccttatcaaacaacatagtaatgatctgatggatgcctgtgaaaaggtatcccatattgaatttgtctatgggaaagcaaaactcgctatagctcaaaaggcagtacaagccacattgagcgaagggcgtgacgtcaatttgatgcgtgctcgtcatccgttgattcctgccaatacagttgtacctacagatattcgtctaggtacggattatcgaattttattgattactggctccaacacgggtggtaaaacggtgtcattaaaaacacttggcttattatcccttatgaaccaaagcggtttatttattcctgctgatcacggttctatattgccgatttttcacaatatttttgcagacattggggatgaacaaagcattgaagctagcttgtctacattctctgcacacatgacacaagtgatttctattattaaacattgtggtcctaatgatcttgtgctactcgatgaactcggctccggcacagatccggaggaaggtagtgctttagctgtatccatacttgaattcttccgccaaaaaggaacacttatgatggtaagtactcactataatgagttaaagaactatgcgtaccatacggcaggtatcgagaatggtcacgttgaatttgatgagcgcaccttaaagcctacctatcgattacatattggcgtagctggtagtagtcatgcattgagcattgcagcgcgtttagggctaccaaaggatattgtcaatcgtgcacgcgattacaagtctaaatttggcagtagtgaaatggaaaatgttctaaccgatttgaatgaacaattacgtaaatcatcggaacgcgaacgggcactcaaaaaagaattagatgaaacacgtcgtatgcgcggtcaattagaaagagaaaagaaacagtttaatgaaaaacgtaaacagatgttagcgaaggctcaagctgatgcggaatcgatgaaacgtagtctccgcgtagaaggggaagccatcattaaacagttaaaggctcaattctctgagacaaataaggataagcgcctatccgctatcaatgcagctcgtaaaggaatctctaatgttcacgtgccagaggcaccggtgaacgatgatcgtaagacattatctattgatgcagttgctattggtcaagttgtatatgtcacatctttgcgctcgttagggacggttttatccattaagggcaatcgtgttactgtagatatcaatggtttatctgctactgtgaaagtaaatgaattgcaaactactacgagagaagaatccaataagattcaacgagataatcttaaggcccaacctaaaacacgcaaaaaagcaggtggctctgccgtacaacgtcaaaaagaggtacgtacagagattaatatcttaggtcaaaccgtagatgaagcagtagtttctgtcggtcgttttatagatcaagccttacttggcggtgttaatcaggtccgaatcattcatggtaagggcactggtgcattgcgtgaaggcgtacatcagtatttacgaacattacctcacgtagcgcattttgaaactgcaggctatgatgaaggcggagcaggtgccacaaacgtagtgttaaaataacatactatttttaagataatgcaaaaaaagaagcagactcacatgagtttgcttcttttttgtaatagaaaagaggcaaaaccatgtggttttgcctcttagcatgttaatcagctactagttagcgatctttctttttatcttttttagacttcgattgactaggtttagaatcggtagattctaccttggatgatgagtcatcatcttttgagattgcatcatttttatccttatcatcctttttatttttgtcatcttttttgtctttgtcgtcctttttcggcgcttcttttaccggattgtaatgtccttcactgacagctgcttgagcgctagctggtacattaaagtcggaagcaggggtattggctaatgcggccgacataaattgtctccacattacagctggcgttgaaccaccagtaatacctaatgtttcagatccgtagtcatcaccaatccaaacagcagcaactaaatcaggcgtatatccaacgaaccaagcatctttttcatcatctgttgtacctgttttaccagctgcaggtctaccgatagcagcattgccaccagtaccaccattgataacagactctaacatatctgtgatgatagcggcatctttctcttcaacgacgcgtttttcttggatggaattttcttccaccacttgtccgttacggtctacgatttttatgattgctgtaggttgaaccttaacgccaccattagcgagtacgccataagcttctgccatttctaatggtgaaacaccatgagttaaaccaccgagtgctgttgataagttattatcttcatcagttaaggtagtaatacccatcttcttagctaagtcgataatcttagacataccaacttcatcagcgatttttacagctgggacgttacgagaatgttgtaatgcatagcggtacgtaatatttccctcatagtttcgttcatagttttgaggacgccatccattaaaatcaacagggctgtcatcaacaatggaccctggagttttaccagattgaatagcagctaagtaaacaaaaggcttcatagcagagcctggttgacgttctgcttgtgatgcacggttaaaggcatcatctccacgaccaccgaccatggcaacgatatagccattatgtggattcattgctacgatagcaccttgtggttggtgtagaccattttggtcagtatacatagttggtagattttgcattgctgcaacagcagcattttgcgcatccatatcgagagtggtataaatttttaaaccatctttgtagattgcatcatcaccatatttttcagaaatttgagcaattacgtagttgataaaatacgatgcattgttgttttcgtgagtttgctcttgtttagcaaccaaacctaaatctgcttcgcgagctgcatcggctttatcttgtgaaaggtaaccatacttaaccatttggcccaatacaacggcttggcgttttttaccagcctctaagttattgaatggggaatagtagttaggactttgaggtaacccagcaagcattgcacattgggctaatgttaaatcgcgtacatctttaccaaagtaaacatgagcagcagattgaacaccataggcaccttgaccaaaataaatttggttcatatacatttcaagaatttcttgttttgtatagtgctgttcgattttaagtgctaataaagcttcggaaattttacgtttgagcgttctgtcttgggaaagaaatgcattacgagccaattgttgtgtaattgtggaaccaccttcggctacaccactatgcacaacattaacccagatagcacgtaaaataccgatagggtcgataccatgatggctataaaaacgagagtcttcagtagctacaaaagcatcttgtaattcttttggtacttcgttaattggaactggcaaacgattctctgtggaatgaaccgtagtaattaaattgccatgtacgtcataaatctgagacgatgcagatggtcgtacattcgatacatctggaaggttagacatggtagcacttataaatccacaaccgccaccggctacaataagaacaagtaataatacaatcatccaaatcgtctttttagttgatgcctttggattgctcgggttaggagctggcttacgacgagctctcatatttgagttattacccatagagtcacctcttttttaaagtaaatataacgtaaaatatattacgcagttataaatagtataccataaaagagataaaacaaacactatatataattgtgaaagcctatttataatggtatactatagagaacagattttatgtaggaggatttccatgattacagcacaagaacaagtgcgccaaattacacatggcgtatctggaataattaatgaagaagacttagtcaaaaaaatagaacgatctattaaagaaaataaaccattgatcgtaaaattgggccttgatcctacggctcctgacattcatttaggtcataccgtaccacttcgtaagcttcgcttgttccaagagtttggccatcaagtggttattgtaatcggcggcttcacagcacgtatcggtgaccctactggtaaaagcgtaacacgcccaccactaaccaaggaagaagtattaaaaaatgcggaaacctataagacacaaatctttaaggtattagaccctgaaaaaacaattgtacgcgataatagcgaatggcttgaatccatgaactttgctgatgtacttcgcttggcaagttcttatacagtagcgcgtatgatggagcgcgatgactttgataaacgctacaaagaaggtcgtcctatcggcgtgcatgaattcatgtacccattgatgcaaggtcaagattctgttgcattgcatgcagacgttgaatttggtggtacagatcaaactttcaacttactaatgggtcgtcacttgcaagatttggcaggacaagaacctcaagtagttattactatgccattgcttgaaggtcttgacggcgttcaaaaaatgagtaaatccttggggaactacatcggtattgatgaagcacctaaagatatgtatggtaaagccatgtctattcctgatgaattgatgatgcgttacttcatgctcgttacggatatgtctatcgaaaatcaagacgacatggaagaacgtttggaaaatggcacattgcacccacgtgatgcaaaaatgcaattggcaaaaactatcgttcgtttatatcatggggaacaagcagcgcaagaagcggaagatgaatttaaacgcgtattccaacaacatgcattgccaaccgatattcctgaatatgctatggataaacctagcgaagcaattttcgtaccacaattctgtacggatgctggtttgactgcttctaatggtgaagcacgccgctccattaaagctggtgcattcaaagtcaatggtgaaaaatacggcgaagaaaacctagttcttgaagacggcatgatcgttcaagtaggtaagcgtaaatttatcaaaattaaatttaattagttgataattttttgagtaaataatattaatatagaaataatagggagctgatataattagctccctattattttgatagaagactattttaatatttttacccttaaaaagcttataatttaaaaatgtctagtattaagtggagtatagccttggagaaagataataaatgaagaaatcattacaattattgctatttaaaccgatatcttctggtgccacatatttaataaaaaatgaaactataaaatcagcactaatgttgttttgtatcgcttggattacagtgcgtggattatatttaataaatggaattcatgttaaagcttggcaaagtattcatattttatatcttgatacatttgttggctttaatttatcaccctatttaattgatttttcttatcgattatttctttctattttgattgcatttatatgttggattgttatgcgaatttgggttaaagtagactttttaaaagttttcatggtaaccctagtaatatctgcattaaatttttttgttactattcctaatattttagtttttaatctggttaagaagctttcaattgatagtcctttttggggaaaaactatatatgattttgttcattttttagtagggctatttgaaatttatgtatactttctatttactgtactcttatacagattaactaatttaaacaaatggggcatagcgatattcttatcgttattgttggtaggtatatcaatcgttttcaagcctttggaagcttttttcagttgactattaaataaagaggaatttaatgtttcgagattcaataagattattagtacatcctaataaagagacgatactagatataattcaaggtattacatttaaaggtgcaatatgtttatatactctggcttgggttatcttgcgaatcattatggggaatgccggtattgatgttcttcatattttaccaattcttgatcataagctagtttatgttaattacataatagtttttattgtagactatatttacataatgtttaaaactataatattagcatccttgttatggttattattaaaatggtggcattcaacctcattaaaaagttttatagtaatgacaatatattcaatggggctttgctttttatttgctagtataaaattttatcttcagtcttattttttgagtttgaattacttagataataattggagttttataatgtggaatattgccggtctatttggcaatattttaattttctattcttggatattatacttaatgatattgtatcgcttaacaaatattaataagtatttattaatcgtttgcactgcgttaatttgttatgtattttatgcaacgcaaataactatatccatatagtagtttttagagatggccgtttataatttaaatggtcatctttttgtttttgtagtatatatttgaaaatatgcctataaaaattgacataattttgattaaggtatactatttatatgtaaaaggtttaatgtgttgcactaattacaaacaggaggttctcacatgaatcgcgaaacagcttatgtattatggtttgatgaattaaaacgtgaagatgtaaatttagtaggtggtaaatcctcatccttaggtgaattaacttcctctacaaatgtacctgtaccttatggttttgcaacaactgcatatgggtatcgtgagtttatgaaagaaactggccttgaagatcgtattcgtcaagagttagatgatttagatgatgtagaaaactctgcattacttcgcgaagtttgtacaaaaattcgccgcatgatttgtcaagaagaaatgcctgctgcattggctgaagctattcgcaaatcgtatgaagaactaggtgaaaaggtaggcgaaaaagatccgttcgtagctgttcgttctagtgcaactgcagaagacttaccagatgctagttttgctggtcaacaagatacatatttaaatgttcgtggtgcagatacaatcattgaaaaagtaaaagaatgttatgcatctacatttacagatcgtgcaacatattaccgtgtaaaacaaggctttgaccatatgacagtagcgttgagcgcagctgttcaaatgatggtattctccaaagctgctggcgttatgtttacggttgaccttgtaacaggtaatgataacaacatcctaatcgaaggttcttggggtcttggtgaatatgtagtacaaggtacagttacaccagataacttccgtgtagataaacaaaaaatggttatcactgatcgcatgattaatgataaaaatattcgccttgtacgtaaagctgatggcgattgcatagaagaaatcgtacctgctgatgaagctaataaacaagttatttccgatgaacaagtattggaattagctgaatacgccaaagctattgaaaaacattatggctgctacatggatatggaatggggcgtagatgaaagaaatggtaaaatctggattcttcaagctcgcccagaaacagtatggtccagaaaagataaatctgaacaaactgcagaaacaagcgcagctactactacagatcgtgaaatcgtagttaaaggtttaccagcatctccaggtaaagctgctggtaaagcacatgttatcatcaatcctgaagatattgatgaattcaaagaaggcgaaatccttgttacagctatgactgcacctgactgggttccagctatgaaaaaagccaaagctatcgttacagatgctggtggtatgacttgccatgcgtccatcgttagccgtgaacttggtattccttgtatcgttggtactaagagccgtagccatgaagctacaacttctattaaagaaggccaaatgattactgttgatgcaactaatggtattgtttacgatggtgtgttagaagatgttgttaaaccagctgcaccacaagaacaagctgtggtagcaagtgaatatattcctgtaacgggtactaagatttacatgaacttaggcgatccagatttggctgaaaaatacggtgtattgccttgtgatggtatcggtttgatgcgtgaagagttcatttggactacattcatccatgaacatccattgcaccttatcgaaacaggtcgcagtgatgtagctgttaatacattggctgaaggtatgcgtaaggtatgtcaagcattggcacctcgccaagtagtagttcgtttaagcgactttaaatctagtgaataccgcgaccttaaaggtggcgacaaatatgaaccacatgaatccagtgcattgcttggctggcgtggtgcttcccgttactatgatcctaaatacacacctgctttcaaattagaattagaagctattaaaaaggtgcgtaatgaatttggtttcaaaaacttacaagttatgattccattctgtcgtactgtagaagaagctgaactcgtaaccaacttgatggctcaagaaggacttgtacgcggtaaagatttcaaaatctggctcatggctgaaattccagcaaatattatcttagctgatcaattcaataaatacgtagatggttattctatcggttctaacgatttaacaatgcttgtactcggttgtgaccgcgataatgaaacagttcaacacatttatgatgaacgtaatttagccgttcgtagagctattcgtcatcttatcgaagtggctcataaagatggtaaaactgtatccatctgtggccaagcaccaagtgtttaccctgaactttgtgaattcttagttaagagtggcattgattccatctctgttaacccagatgcggttaaaaatactaagaaaatggtggctcaaatcgagcaacgcatgatgatggatgcacttacaggtcgtggtcgccaagatgtagaagaccttgaatggtaataaagatatactttatttgatgatgtaaagaggaggcgattgagcctcctctttttctaaaatgatacataggatataatattcatatgtgaaaggggggacgggtgtgaaactttcaaaacgacaagaagcaatagcccatattgtacgtgaaaaaggacctgttacgggaagtgctatagcggaacatttggatgtgacacgatctgcattgcgttcggatttagctgtacttaccatgattggcgttctcgaagcaaggcctaatgtaggatattactatgttggcttgtcgcctaaggaccaaactgctgaaattttaaggtcttatagcgtacatgatgtgctttcacaagccgttatcgtatcgccagagactaatctatatgatacaatcgtaaccatttttacagaggatgtgggaacgattttggtttgcgaaggttcctatttacaaggtgttgtatcacgtaaagatttattgcgtgcctccataggtcaaaccgatgcacatacaatgcctatctcaatgattatgacacccgttagcaaagttatcaccgtagaaccatcggattcgttggctgtggcggcgcaaaaaatgattgactatgaagtcgattgtttacctgttatagttagagaagacgatgaatcacaagatagtcctaagaaacgattaaaggtcgtaggacgtgtatctaaaacaaccgttactaaagcgtttttagaatgtagtactcaagaggtataaagaatggcagaaaaaattatttatgcgatatctgactccttaggcgaaactgcagaggccgttgcaagagcaacagcaagtcagtacgataaggaacaaattgaaattgttcgcataccatatatcgaagataaggctcaaattgatgaaattatacgagatgctaaaaatggcaatcacgtaatttgtcataccattgtatctttagaattgcgcaattatttgcacgaaaaagcggcagaaaataatattcctgctgttgatattatgggccctgtattggatgctgtaggtacagtagcatccacgaagccacgcatgacggctggtatggtgcataaactagaccaagaatattttaaaaaggtagaggctatcgagtttgccgttaaatacgatgatggtaaaaatccatcaggctttgaaaaggctgatgttgtgattatcggtgtatctcgtacaagtaaaacgccgttatccatgtttttagcgtataaaaaaataaaggcagctaatttaccactagttccagaggtaccattgccagaggaattatttaagattccacctaaaaagattgtggggttgattattgacccatataaattgaataatatccgcagtgaacgtttgcgtgctattggcttagaagatgaggctaattatgcctctattgagcgcattaattctgaattagaatatgcaaaagccattatgcgtcgtctacattgccaagtgcttgatgtttccaacaaatccattgaagaaaccgcatctcttgttatgcaattagtagataaaaatcgtatggctgccggaaaataaataggggaggcgcaagcctccctattgttaaatatatgttgttagcatttgtattaaagaggtactatgaatattagagaacgtatagaagaacgagaggatatgatcctatctccttatgcggcgagaagcagtatggcgttgcgcgatattgatgaagaaccagatccactacgtaccgcatttcaacgagatcgggatagaattatacatagtaaatgttttcgtcgtttaaaacataagacacaagtatatattgcacctggtgatcattatagaacaagaatgacgcatacccttgaagtggggcaaatcggccgtactgttgcgcgtgctcttagactcaatgaagatttagtggaagccattgcaatggggcatgatgtgggtcatacgccatttggccatgttggggaatatgcattgcgtgatatggtgggccattttaaccataatgaacaaagtttgcgcatggtcgaagtattggagaaacatgggaaccgacaaggtcttaatctcacaaaagaagtgagagatggaatcttaggccatacaggaccaactataccatccacgttagaagggcagattatacgtattgtggaccgtattgcgtacttgtgtcatgattatgatgatgcacaacgggctggtatgctagaagctaacgatttgccagaagaagtgcgattccactttggtgataccccatctagcatgattacggccatggtgaaagatatggttgaacaatctcttgataaaccggcgattcagatgtctgctgatattgaaagtacgatgaatatttttagacagtttatgttcaaaaacgtctatctagcacctgcattaattcctgataggaataaggccgctcatgtagtaaaaaatttatttacacactttatggaacatccagatgatatagaaacctatgtagaacgaaacggtgtgtattccactgttgatattgtcgattatgtggcaggattaacagatcaatatgctataaaattatttaaagattactttattccaaatattacgctgtaatagggcgacaaaaagaccgttaccattgggtaacggtctttttgtttaagagtacatgtactatttattttacgcgcgtgtaattttattagaacgaaggcagcgagtgcatacatttactttttttgtagcaccgtctacaaccgcccgtactctttgaatgttcggtttccaagtttttcttgtgcgaatgtgagagtgactcacgttcataccgctagatgtggatttgccacatacttcgcaaaggtttgccatagtttccacctccaagcttaatctataacataacaaaagtatattatcataaagacaaggtttaagcaagtgtttttactacatgcattgatattttatgaaatatactacaatatttggtatactatagctaatattgtagtcgaaatctatgagatatggcaagagaaatataaaaatggatatattttcactatattcattaagtatgtcatatgtgaggcattataatgaacgaagcactgacctctattaagggaattggaccaggtcgagaaaaacaacttcataaattaggcattgatacggtatccaatttattggcttattttccacgctcctatgaagatagacgtaaaatttattccataaaagaattggaaactggtattactgcgggggttgtaggtactgtcgtatccattacggaaaaacggccacggcctcgcttatctattttagaagttatcatcacagatggaactggtctgatgaagattgtattattcaatcaaggatataaaaagaacttttacaaaaaaggtcaacgcctctatgcgtacggtaaggccgaatttcaatatggttctatgcagatgaattctccgcaaatagaaaatctcgggccagatgctatgccagatacgggcattgttcctatttatcccttggtggatggcgtttctcaatatgtggtgcgcgcatcgattcgaaattggttcgaagcgcatcatacaatggatgaaattttaccgcctgaaatcatgaattatcatgcgagtatgaagcgatatgatgcatttaaagaaatgcattttccttcgagtagtgaaagttatgaaaaagcacggtatcaattagcctatgaagaattatttatcatgcaatctggtttggctctgcttagaaataaagagcaatgtcacgtagggcctaagatggaaccagatggggtactaatggcacaatgcagatcgaatttaccctttaaattgacgggtgatcaggagcgtgctgtaactgaaatttcacaagacatgcaagatgaacggcccatgcaacgattattacaaggtgatgtgggctctggcaaaactgttgtagctacattgagccttgtaaaagccgtagaaaatggataccaagctgttatcatggcacctacagaaattttagcgactcaacattttgaagggataactgaattttgtaaaactttgcctattaatattgcattgcttacaggatccacacctaaaaaagaaaaggataaaatctatgaagagctggcaaatgggacgattcaattgattatcggtacccatgcgcttattcaagataaggttcaatttaagaacctgggattggttattatcgatgaacaacatcgatttggtgttaatcagcgtgccgcattacaacataaaggggtgtatcctcatgttttaattatgacggctacaccgattccaagaacgatgacgctatctgtatatggtgatttagcggtatccctcattaaggaaatgcctccaggacgtaaaccggtcaagacgtatgttgtagatagctcatataaagaacgattgcgcgtgttctttggtaaggaaatggcggcaggtcatcaagtatatgtggtttgtcctctagtagaggagtctgaaaaactagatttacaagcagcagaagaactctttttggaattgaaagactatttttataaaagctttgaagtgggccttgttcacgggcgtatgaatccaaaagaaaaggatgaggtgatgcaagcttttcataatggacgcattcaattgctcgtgtctacaaccgtcatagaggttggcgttaatgttcctaatgcgacgattatgtgcatagaaggggctgagcgttttggattatcccaattacaccaattacgaggtcgcgttgggcgtggtgacattcaggcgtattgcatattagttagcgattccaagggggatgtcagtcaagaacgattgcggttgatggaatccacgcaagatggatttgaattagcagaacaagatttattactgcgtggatctggccaattgtttggacttgcgcaatcagggttacctgatttacgggtcgctaatatcataaaagatatagatatactagtggcagcgcgtaatgatgtgctgttatatattcgagaatttggcatcaatcaactagaaattcaaatgaaagaagaattatcaaaaagatttggtgaaaaatttcttagaatattgtataattaagaggtagggctaataattctataaggtgcgataatactaggttttatctaggttttccccttgtatataacggcctattctcgtataatataaaaaacaatatttttgtatctatggaggtgccatatgccattaattcatgttgaactcgttgaaggtcgtacaaaagaacaaaagaaacaattaggtgaagctatcactaaggctactgtagacatcgtaaaggttcctgcagaagcagttaaggttatttttgttgatatgaaaaaagatgattttatggaaggcggcattttgcggtctgaacgctaatgaaagctacgattatccgttctagcccactgggctagaatgggtcgtagttttgttttttattatacgagaaaggaaaaacaaatgagagacgataaattcggtatgcgtggattgacttttgatgatgtattgttagtgccggcagcatctgatgtattaccatatcaagtagatttaaagacacaattaacacgtgatatttcactaaatatcccaatgattagttctggtatggatactgttactgagtcccgtatggccattgccatggctcgtgaaggcggtatgggtgttattcataaaaatatgtccatcgaggaacaagctcatgaagttgatacagttaaacgttctgagcatggtgttatcgttgatccgattttcctaagccctcagaaccttctctctgatgcagaagagttgatgtgtaaatataaaatctctggtgtacctattacagaacatggtaaactagtagggatcattacaaatcgcgatatgcgttttgaaactgatttatcccgtcaaattggcgaatgtatgacaagtgaagggttagttacagctcctgaaggtacttccttggaaatggctaaatccattttgagcaaacatcgtattgaaaaattaccattagttgataaagatagtaatttaaagggtttaatcactattaaagatattgaaaaagctaccaaatatcctaattctgcaaaggatactagcggccgtctattagttggtgctgctgttggtgtttctaaagatatgtatgatcgtctagatgctctcgtagcagctaaagccgatgttatcatcgtcgatactgctcatggtcattctgcaggtgtgttgcgtacattaaaagaaattaaacaagcatatccacatattccggttattgctggtaatgtggcaacggcagctggtacagaggctcttattgaagctggtgcagatgctgttaaaattggtattggacctggctctatttgtacaacacgtgtcattgctggtattggtgtacctcaaatcactgctgtctatgagtccgctcaagtagcaagacgttatggtattccaatcatcgctgatggtggtattaaatactctggcgacattgcgaaagcgattgcagctggtgccaatgttgttatgatgggtaatattcttgctggtactgatgaaagcccaggagaaactgttatttaccaaggccgttcctataaagtataccgtggtatgggtagcttaggggctatgaagcttggtagtaaagatcgttatttccaatcagaagctaaaaaattagttcctgaaggtatcgaaggtcgtgtaccttataaaggtatgttggcagatactattttccaaatggttggtggtttacgtgcaagtatgggatactgtggttgccataatattaaagaaatgattgaaaacactcaatttattcaaattacggcagcaggcttgaaagaaagtcatccacatgatgtaagtatcaccgtagaagcaccgaactatagtggtttataatggagtattattttgagtaaacgtatttcggtattatccgtccctattgattgcatcactatggacgaagcagtttcaaaaattatagagatgacgaagcaatcagggctacatcttgtagcaactgccaatgctgaaatggttatgctagccaatcaggatcccgtgttacacgggatcttgaattccgctagtctagttgttcctgatggagctggtatattatgggcagcggaacgcatgggtgaaagagtgcctgaacgcgttactggtgttgatattaccaaagaattgtttaaacaagctgtaagcaatcaaatccccatatattgtttaggtgctgcgcctggtgtagcacaacaagcagtttctaatttacaagcaatgtatggtactattaatatagctggcatccatgatgggttctttgatgaagcagaggaacaacgtattattaacgatattaaaacttcgggtgctaagctcgtatttgttgcattaggtgtgccaaaacaggaacaatggatttcagaaaaactatcctctttacaaggcgttgtagccattggtataggagggtcttttgatgtattggctggaaatattccacgcgcacctcattggatgcaacgtaatcgtttagaatggttatatagattatatctggaacctaaacgtataggccgcatgttggctataccaaagtttatgtggactgttattaagaataaataggggagtttagttgtgcctacaggaccaataataaaagaaggatttcctttaatcggagtgatgctcttcattacgattatagcggtgtattttggatattatagtatcgcaatcattacatttattttggcattattttttgtgaacttttttagaaatccaaaacgcaacattcctactgacccagatgctattttatctccagctgatggcaaggtaatggaaattgaagatgtatatgaagatttgtatttacatcgagaatgtaaaaaggtaacaatctttttatctgtttttgatgtgcatgccaatcgagctcctattgaaggcaaaattacatatcgtcattatacgatggggagttttttacctgcttttaaagaagatgtggggtttgaaaatgaacgtcatacaatttgtatagaaaacgataaaacagaagtactcgtcacacaaattgcaggtttattagctcgtcgtatcgtttcttggacagatcttgatagtgtattacaacgtggtcagttatatggtatgattaaatttggttcatgtactgaaatttacatggataaaaatgtagagatttgcattgaaaaaggtcaacatattactggtggcgatacaattatcgggaggctccgtcatgaataaatcagttattccaaatttatttactagttctaatttagcatttggtgttatcggcattacattgtctgctacgggcaatacctttggggcagctatttgcgtgatactatcactgattgcagatggtttagatggacgtgtggcacgtgcgttaggcgtagcaggtcctatgggacgtgaattagactctttatccgatgtagttgggtttggcgttgcccctgcttatatgctgtatgttaacgatttacaaggattaggctggcttggctatgttccattattagcctttgctgttttaggtgcttttcgtctagctcgttttaatattaaaacagatgaagttcacggttattttgaaggccttcctattccagcggcaggttgtttagctgctacctatattttatgtggtgtgcaagttccacaactagttgtgtttgtgtctatgattcttgttggtatcttaatggttagtgaagtaaaatatcctgactttaaaggccacagtgcagttcgtattagcaaaattgctatcgcattagttgctattatcattattgctgcattggtatatgattggcatacatgggctgttatgatttttactggttatgtgttgtttggtctgtttaatacggcgttaaatatagtgcgcaaatagactgtggaggtttgtcttatggattacctactggatctgatactgattcctatgcaggtaataatcgtaatttatacggtttattatttcgtacttgccgttataggtatgtggcggtctcgagttcataaaaactatacgcccaaaaattcattcgccattgttgtgtgtgctcataatgaagaggctgtagtaggagaactcgtaaaaaacttaaaaggtttagattacccagacgagctgtatgatatctttgttgtagctgataactgtactgataaaacagctgaagtggccagtgctgcaggagctaatgtacatgaacgtttcaataaagaagaggttggtaaagggtatgccatggggtggatgtttgaccgcgtggataaaatggataggaaatatgatgcattccttatctttgatgctgacaacttggtacatcctcaatttatgctagaaatgaacgatcatctcgaaaaaggtgaatctgttattcaaggttatcttaactcaaaaaatccaactgattcatgggtggctggtactttttccatcatgttctggatggttaaccacatgtggcatttagccaaatatcgcattggtttatccacagcattgggtggtacaggcatgtgtattcgtacatctattattaaagaatatggatgggattgtacaagcttaacagaggacatggagttctctatgaagctattaacacatggtattaagacgacatgggctcatgatgccatcgtgtatgatgaaaaagtaacgacgatgatggcctcttgtaaacaacgcttgcgttgggctcaaggtcaatttgattgtgcagatcgttatattcctaaattatttgcagcgggcattaagcaaggtaatattgttattttagatggtattttgcaagttagtcagccatatttcttattgttgacgaccgtatatttggtattttcttatatcaatgcatatgtaccaatttataccaatattttgtaccaaattatgcctatgtccgtatggcaaattataggtattgggcaatatctattcccgttaattgtattattgaaaattaaggtaccacctaaaatttggttctactatttgttatatccaatttttgtatattcatgggttccagtaaatattttaggatggttccgtcgtcataataaggaatggtctcatacggtgcatacaagagctgttggcttggaggatgttaaattaactcgtatgggagatatgaataagaataaaaaatagaatctataggagtgactatgcatatcttaatgtgtaacgatgatggcattttagctgatggcttacgccaattagcgacgtatttaagtcaatattatcgtgttaccgttgtagcaccagctactgaacaaagtgctaaatcccatgcattgacgactgagattcctttaaaattagatgcgtacaatggcgaggatgaaaatcctcgcctttatgcacttacgggaactccatctgattgtatgaaatttggcctcagttatttattagccgatgacatgcctgatcttgttatttcaggtattaatcatggctttaatttaggttctgatgtattgtattcaggaaccgtatctgcagccatggaaagtgctttttatggaatccctggccttgctttatctgtagagcgatattcgattgagcgtggtcatgaaatgcatccgtttatccatgaattaattgagaaaatttatgtaaatggtaattttgaaggcttattaaatgttaatttcccattgcgcggcatttgtgattgggatcattttaaattggtgagccaaggacttcaaacctatagtaatataattgatgctagaattaattcacgaggtcaagattattattggttggctggagacttggattgtggaaaggaagacgtaccaacagatgttgaatacgctcgaaaaggttatattacaggtgttactttgacatggaaacagcaagatgatgcggcgatgcatacactcacaaatattttagaaaaaatataaaaaatttgttgacagacctttgttattcctatataattacaaatgttccgagacgccggagtggcggaatggcagacgcacttgactcaaaatcaagcgggtaacaccgtgtgggttcaagtcccacctccggcaccaactacaagcggaaacgcttgaacaggtgataagagtaatcttatcacctgttttttgtttatacgattcaagtaaaatgatagaggtctctatggacacacaacatattatggattatctaccaataacatatgcactgcagcaacaagatgttagcaagacaatggttgatttaaaactgttaaaagagatacccattgatagttccgtcaatcaatgtcaaggattctgctataactcaaaaaaagatgtatttgtactagcttgtattaattctgaaaatacgcgacaagttatatatgagatagatccaagaacatttgatattgttggaacctataagtttcgtgatgctaatgtattagcacatatgaatacgcttacctataatccagataccaatttgttatatacgacaaatgcaatggttgatggccatcgcattactacaatagatgcagatacaatgagtattggcaatacgattacgattcctgaacgggtatttaatttagcctatgataaaaaaacgaatcagtttatgtcgattgttcctatagatgcaacaatgagacgtatcaattactatacatcacagtttcaactcgttcagtctaaagatatagatgctaattatgatgattataataataatggtgcctttgctaatgatggtaaaactatatttgcaacgttatccaccgttattactgtagataaaacaggaaacgttactaagattgcttcttttccaaaaaatcttgaaattgaagatatggatatgcgtcataacataatgtacgcagctgttaatagtaatcataaggtttttatttatactatgcttaactattaatagactgcacttcatcaatgattaatgtaacaaaattgtgtataataaaatgatagataatcgacacataagaggttatgatatgagattaggcacagatataatagaaattgagcgaattaaaaaagccatagaccgttcagctcgctttcgacagcgcgtatatacggaacgtgaaattgcttattgtgaaagtaaacgcacagggatttatcaatcctatgcaggtatttacgcagcaaaagaggcttttttgaaagcattggggactggattgcgttacggctcatggcatgatattgaggtgtgtcatgatgaattcggggctccatctctaagcataacgggggctttcaaaaaaattatgcaagaacgaatgtatacagaatctatagtttctattagtcactgtcggtcgtacgctatgagtacagtcatcataaagaggtaatttatgtacagtttaacgagagaagcatcacaacatattgatgcctatgtaccgcgtcatctacacgtgcctttggaagtgctcatggaaaatgcaggtcgaggtatagccgatgcgttggtagatgtagaaggaaaccgttttagggaggatccttttacaggtatggttctatttgtgtgcggtgttggtaacaatggagccgatggactggtagcggctcgtcatttaatggaacaaagaattcccgttaccattgcattagtaggcaatgtgtcacatggtagtgagctatttaataaacaactaaccatggttcgtgccatgggaattgatattgtttcttttgaaagttttagtgattggtcccgtgttcatgttgtcgtagaaggtttgatgggaactggttttcaaggtgaattacgagaatctataacctctgtgttacatgatatcgatgtggaacgcaaccaatatggattttccctatgggctatcgatgtgccagccggtgttgatgcgaccacaggacaggcttctgattatgcattatcctatgatacgacagtaacctttggatctattaaagaaggtctattgttatatcctggtaaatccttggccggcacagtaataatcgcaccattaggagtgccttgggaattagcattaggatcagaggctccatttaacacatcccattatgttttatatgaccgtttagcttcactagaactcagtgatcgtatgccacaggcacataaaggtgttaatggtaacgctttgattgtcggtggttctgaatccatgataggggcacctatcatgagtgcagaggcagctgtacatggtggagccggtaaggtatcattagcagttcctaatggtgtgcgacctatcgtacagtctaaatgcataccagaagtcatggtattgccattagaacacttaggttccattaatttacaatcctatgacgtcgttgccgttggccctggattaggacgcacagatgacgttaaagtattggtaaattctttgttagaacgacaatcgggacatatggttatcgatgctgatggattatatgctcttggcaccataggacatgtttatgcacatggggataagactattacttatgaaggcaatatgcagtttaaaaattgtattatgacacctcatttaggcgagtttagccgtcttattgatacatccattaattttatagagaagcattatgtagagttagcgattcaatttgctgtagctcataatgtagtgctcgttttaaaaggaattcctagtttagttgcttttcctaccggtgaagtatatatcaatatgataggcaatcctggtatgggaacaggaggaatgggtgatagtttaacggggattatatccgcctttgtagcacaaggttattctttacagtctgcggccttattaggtgtctatgtacatagtcgaagcgctgatatattggctaaagaaaaaccttggggctatacaccaagtgatgtaagccaatccgttggtttggtactacaagagttattgaaaggataggtagatgacgcgattacaacgaatactactctgtttaatagctttattagtgccactgtttgtactagcaggttgttcgaattcagatgtatccaaagcggctacacaagccgtgtcggcatcatccaattattctattgatacaaagcagactaatgcagaagggcatgttgatatctatatgctagatatcggccaaggggatgcaatacttcttaaagttggtgatgagtatagcatgattgatacgggagatatagaacatcgtgaaaatattgtagcccaactacataacctcggtgttacaaagcttaaaaatgtcatcatcacacatcctcatgcagatcatatgggtggttttttagctattgcaaaagcaatgcctatagaacatgtatatgatgatggtatttctgttgacaataatatgtataaaacatatgaaaaatggattgagaaaaagaatattcaacgcactacgttaaaaaaaggtggtactgttgattttggtcatggtgcagtatttgtagtatatgcgccttgggatgatatattagtagataaaaaagggcaaccggatttaaataataattctattgttggtaaatttatatttggtaaattttctatgctctttacaggtgatgcagaattacaagaagaacaacggcttataaaagagcaaaatagtaagctctttgctcgtattttgaaggtggggcatcacggatcgcgaacaagtagttctgaagatttcctaaaatccgtcaaaccagagagtgcattaatctcttgtgggttatataataaatatggtcatcctcatgatgtgacattacgtcatttgaatgaacacaatatcgccatttatcgtacagatacgatgggacgtattcacattagtacggatgggaatgaatggcaaatttctacagaacgatgatagatatgtataatccgtatacctatcttcatgtttgtatgaaataatctatctataatctaacattagtttatggatagattggaacgatgagacgaaacattagtatcatcggctcatctctatggtttggacaaaaagtatgtcagttagattggagtgaatgtattgcgtaaactatttttaatttgctttgcttttctcatggctgtaccactgttgttaagtcaagcaaaggctgctaatttacaggatgctcgttgggtaacgagaactgatgcacctgttccatatgtacgtatggttatggatttatctactcctgtaaacgcggcagcatccatcagtaaagatggaaaaacgacaacggttactttgaagaatacgaagctaaaaacggcgaagaatactatttatatggattcttccattgctagcgtagctcaactttcacaagtaggcaaagatgtggcagttacgattaaaactccatccgcattggatactaatgatgtgaaggttttctctttgaagaaggatacagtcaatcaaaagccgtatcgaattgttgtagatgtacagaaaaaaggcgtggctccaaaacctatcaattatggtaagaaaccatccccagctacagcgccagcaagtagcaaagggtccggtatatactctgtatcaggaggattatccggtaaggtgattactattgatccaggtcatggtggtagcgacccaggtgctatcggccctacagggttccaagaaaaaagtgcaacattaccgattgctaaatatttgaaatcagctttagaagctcgcggtgctaaggtattcctgactcgtactacagatgccgatgtatatggccctaatgcgagtggtgttgatgagttgggtgctcgcgttaatatagcaaactcccataattcagatgcctttgtaagtgttcatattaactctttcaacaacccaagtgtaggtggcattgctacatactactattctaaaactggtaatgacgctcgcttagcacaaaaagtacaaaatcaaattgctaatgtaccaggcttcaatggtgacagaggtatccaagaaggtaatttgtatgtattaagacatacaaatatgccggctattctcgtagaattaggctttatttctaaccctaatgaagaacgtgcattgaagagcgaccaaacaaaacaagactttgctaatcgcattgctgctggtattgctagttactttggaggctaaggatgaatattcgaaatcaaataacagtgattgcttgtatcggcatcctagcttttacagcgggctgtaattccaatcaaatgcaaaacacaggttctacaaacgtaagccaagaggtgaaggtcaataaagatgctgaaactgctaagacttctagtgaatccgttaaaatggtattctttgttcctactgaagatggttccggtgttaaacaacaatccgtggatatcgcagcagataaggtgacgccgaaggcggcattgcttgccatgttaaaagctgatcgccaacaaaagtatcctatctttgataaagcgataaaaatcaactctgtaacagttaaagatggagttgcttctgtagaggtgaataaagcttttgttgatggtaaaggtggcgacttaactgttaagttgcaaatggctgctattgttaatacattgacctcttttgataatatcaatggagtgctctttgtatgtgatggcaaaaaggttcctattgtaggcgcattcgatacgaatagccctattaaacggatggaacaactcataaaaaaataatgtacgaatcgacctcatcagtatgatgaggtcgattttttttgcattcttatatatgttacaatacatatagtgtataagataaaaaaggtgatatagtggaacttaaaactcttggtgaatttaatttcatacatagtattgaatcggatacaatatatgacaataagacagtggtgcaaggcattggcgatgattgtgccatttataaagctagtgaagggtatgatcagctcataagtacggataccatggtggaaggtgttcattttagctttcattatatggcgccctatgatgtaggatatcgtttgatgacggctaatttgagtgatattgctgcaatgggaggtataccacgtcaggttgtattatctgtagctgcaccaggtcatattgatacgcgaattttagatgaaatttatagaggtattaaggatcagtgccaacgatatcatgtaaatcttattggtggtgacacggtcagtacagatggacccatggtgtggactattactatcataggcgaggtacctaaagatgaagcgatactacgaagtggtgctcgacctggggatgtggtgggcgttactaattatattggttatgctgccacagggttaggatccttatcatatacccttgatggctatcctatgacgtgcatcggtcatcaacgaccagaacctcaaattgaattaggccaatcgttacgcgaacttggtattcacagtatgaatgatattagcgatggtcttagtagtgagttgaatgaaatagcaaaggcatcacatgtttcaatcgtcattgatgaagcacttatcccattgcatgaagaaacatataaactagctgctgtattacatactaatcctgttgattatgccttattgggcggtgaggattttcagctcgtatttacggcgcctaaggagctttcacaggcattagaacagttaggttctatcacgcttattggtgaggttatagagggaaaaccgatggtacaatcggtgactaaggataaagagatacgcttattagaagcgaaaggatataatcattttcatgagtaaaaataaagttacattagaaacatattctgtagaggatacgcaatgttttggtgaacgcctagggcagtgggtcaaagagtctgctagtccactatgcatggcattaatcggcgatttagggactggtaagactcatatgtctcagggtatagcaaagggtcttggcgtgtcggaggatattacaagtcctacattttctcttatgaatacctatatgacattggctggtgaaatataccattttgatttatatcgcatggatgatgtaagtgaattagaaaatattggattttatgaatttacagaggatcaagttgccattgtagagtgggcggataagtttgaagatgaattgcccgatgaaacgttatggatacatattgattcgattgatactcactctagacggattacattagagagcgatgtacttgacgctgaaacattgaatactttaggaggtatgtatgtggttgggaattgaaacgagttctgtcgtttctagtgttgctgtgatgaatgaaagtcagttgcttggtgaaattactatacaagcaggattgactcattctgagcagttggtaccacatattcaatcattgctagagatgacgagggtagaaaaatctgatttacaaggaatcgttgttgctagtggtcccggttcctttacgggtttgcgcataggaatggggacggcaaaggcgatggcttatgcattacatatacctttatatggggttatgactatggatggattagcgcgtaatattccatacactactgatacgatttgcactgtaattgatgcgcaaaagaaacatgtctatgcggctctgtatgcatatgatggagagcgtttacaggttaaagaagagccattcgtagtggaagctgcttcattagtagaacgattacgaaaccaacataaacgcgtcgtatttgtgggcgatggtattaagcggattgctccactagtagaagatgatgagttattaatcattggtgatcctatctatcgcatacctaaggctagctctttattattaagtgcccgccctttgattgaacgaggtgaaagtgctgatcctatggatatggtaccgcactatattagacggtctgaagcagaagtattgtgggaagaaaagcataaagataatcctgctatgttaaaggagaatcctacagtcactgtaatcgaagcggcaggtgaaaaatagacatgacagtccgtagagcaacgattgaggatgcaaaggaaatttttgctattgaaatggaatgcttttctgttccttggagtttagattccatagaaacagaattactgaatgaagataagaaactctattatgtcatagaagatgccaatggtgttgtaggttatgcaggggcgtggctcgtatatgatgaagggcaaattacgaatattgcgatacgtccatctgcaagacgccaaggctttggtgctaaacttacgagtgcattgatagaggaatgttttaaacgaggcatgcatgaaatctttttagaagttcgtatatctaatttgtctgctttatctttataccgcaaattggggtttactgtaaaaggtatgcgaaaaaattattactcagagcctaaagaagatgcgtatatcatgtctcttattaaagaggaaggaaaatgagtgtatatacattagcattagaaagcagctgtgatgaaacatcggccgctgtacttaaggatggccgtacagtactttctaatgtcatatcgagtcaggtgccaattcaccgaaaatttggtggtgtagtgccagaaattgcatcccgtcatcatatagaacaagttatccctgttattgataaggcattagcggatgctcatgtcacattggatgacattgatcatataggggttacctatggtcctggattagtaggggccctattagttggtgtagcagctgcaaaaggattatcctttgctacggggattccattagtacctgttcatcatatggaaggtcatatttttgctaatttcttagctaatcctacattagaaccaccatttttaagccttgttgtatccggtggtcatactatgctagttcatgtgaaaggctatgaagaatttgagattttaggacaaacacgggatgatgcggcaggagaagcctttgataaaattgcccgtgttatggggtttccatatccaggaggacctcatattgatgcattagcaacagagggcaatccagatgctattgagtttccgaaggcccttagtgagtcgggaaattttgaatttagctttagtggcttaaaatcagctgttctaaattatttaaatagtaaatcacaaaagggtgaagccataaataaggctgatgtggcggcgtcctttcaaaaggctatcgtagatgttctggtagaaaaaactaaggatgcagctcatacactaggggaaactaaaataaccattgctggtggtgtatcggctaaccaaggattacaagtagcattagagaatatgtgtaatgaagaagggtttacgtactataaaccaggtaaaattttagctactgataatgcggctatgattggatgccgtgcttattatatggcacaagccggaaaattctgcgatttacatttaaatgctaagcctagtgtgccaattggtaccgttgcatgggtagaaggtaactagtatgactgtacatatatatgatgaacttgttaaggaaacaaatctatctagtttgcaagcagccctactagttcatattagtcatatgattcgctttggccaatcggtgagtaaacataagattgttttgtttacagagattgcgaatgatgacatgatgtgtatatatgagtctaatgactcattagttacatcacgcatacctagttctgatatgtggaaaaaactgatcaccaccggtgaaagctttcaacaatccacacaaagtggatttgaatatctatttcccattgtcgataatggcggtaagactataggaggcatttccttctcttatatagcacctgccaatggtgtggaaggtaaacaaggatttatcgtagccgatacaatgcaacgattgatgttgacggccacagatgaacaaattaaagaatatgagcctatatcgtatttggatgggctcatcatttttgaccaaaatgggactatcttgtacggcaatgatacggcgttacacttggcggatattgtcggtgttgatcggcggttggtgggcacatctatttttggtagttctttaaaaatatctgctattcatcgtgtcatagatgaacgaaatgattttgtatccgaagaaatctatcataatatggtactaagacagcatttgattcctattccgatgggacgcaatgaatgtcgttgctttttaattcttcacgattgtacccgtgaaagtaaacagcaacaagaactactagttaaaaattccattattaaagagatacatcaccgtgttaaaaataacttacaaacagtagcaggcttactacggatggaagcgcggcgctctgatttaccagaggtaaaatcggcattacaagagggtatttcccgtattgaaagtatggcccttgtccatgatttagtatctcactatgatgaagactatatttctatacgatccatatatgatgaattgtgccgattattacgtcagagcatggtagaacgtaatcaacatgtagaatttcgctatcacggagacgattgtattatttcatctcatcaagccagttatatttctcttgtattcaatgaactgatttctaatagtattgtgcatgggttggataggactgatggtgtaatttcattatctgtatccagtatgaatgatactattgctctagtatttacagattcaggtaaaggtttgcctcgtgattttgatatggctaaaagtaagcgattaggcatgcaaattattaataatttggtgactcacgagctacaaggtcatatgacgattgaaaatggtgatgttggggttattgttacaattcatattcataaggagtaataaatgcgtattttaatcgttgatgatgaatctttaatccgcatggatttgcgagatattatagaatctgaacaacatgaagtggttggggaagcatcgaatggtgttgaagctattacgatgtgtaaagaactaaaacctgatgcggtgttaatggatgtgaaaatgcctgagctagatggcatagaagcagctcgtcaaattggatttaaccacttggcacctgttgtacttttaactagttatagtcaacaggatttagtgacaaaagctcgtgaatctggtgtatatggatatttaataaaacctgtcagagaagagcagctgattccaacattagaaatggcatgtggtcgatttttagatgatttagaatcacgtcaacaaatggctgatctagagaaaactctagaagaacgaaaaataatacaaaaagcgacaggcattcttatggatttatataagattacggaggacgaatcatataatcgaattcggcaattaagtatgaagaaacgagagtctattgtcaatatatgtaagctaatcattcaacaagcatcgtctaattaataaaaactatagggcgatacatataaccttctatataagatataaaagcttatatagaaggttattttatatgaattagtacttgtaaaaactaaaaagtcaaaaaatcaaaattaatacttgcaattattttgacataggttataataatacatgtgattagcactcgataagttagagtgctaatgaattatgaagaatacatagtaaataaggagtgacatcatatgttaaaaccattagctgaccgcgttcttatccgtttagaagcaaaagaagaaaaaactaaaagtggtatcttccttcctgatacagcaaaagaaaaacctcaagaaggtgttgttgtagcagtaggtgctggtaaagtatatgacaatggtcaacgtgtagctccagaagttaaagttggcgatactgttatgtttgcaaaatatgctggtagcgaattagaaatcgatggcgctactcacttgattattagcgaacgcgatatcttagcagtattataatagctttcaaggctatacatgttaatgatacattctatattgccttagggcttagggcatatatttctttacattggatagtgttactatctaggaggtaatacatatggcaaaagaaatcttgtttaatgaagaagctcgtcgcgctttgggtcgtggcgttgatcaattggcaaatgctgtaaaagttacattaggaccaaaaggccgtaatgttgtattggataaaaaattcggttccccaacaatcacaaatgatggtgtaactattgctcgtgatatcgaacttccagatccatttgaaaacatgggcgctcaattggtaaaagaagttgcaactaaaacaaacgacgtagcaggtgatggtactactactgcaacagtattggcacaagctatgattcaagaaggtatgcgcaacgtcgcagctggtgctaacccaatgatcttgaaaaaaggcattgaaacagcagtaaaaactttggttgaagaaattaaaaaacgttccattaaagtttctggtaaatctgaaattgctcaagtagctagcgtatctgctgctgacgaagaaattggtggtttgattgctgaagctatggaaaaagtaggtaacgatggcgttatcactgtagaagaatccaaaggcttgcaaactgcattaaacgtagtggaaggtatgcaatttgaccgtggttacatttccccatacatggtaactgatcctgatcgtatggaagctgttatggataatccatacatcttgattactgaccgtaaaatcagtgctatcgctgatatgttgccaacacttgaaaaagtggtaaaagtaggtaaagaacttcttatcatcgctgaagatgtagaaggcgaagcattggctacattggtagtaaaccgcttgcgtggtactttcaaagcagtagctgtaaaagctcctggcttcggtgaccgtcgtaaagctatgcttgaagatatcgctattttgactggtggtactgtaattaccgaagatatgggccgcaaacttgattccgtagaacttactgatcttggtacagctcgtcaagttcgcatcactaaagatgaaactacaatcatcgatggtgtaggcgataaagacgtaattgctaaacgcgttagccaaattcgtgcacaagtagaagaaacaacttctgaattcgaccgtgaaaaattacaagaacgtcttgctaaattgtccggtggtgttgcagttatcgaagtaggtgctgctacagaagttgaaatgaaagataaaaaacttcgtatcgaagacgcattgaacgcaactcgtgctgctgttgaagaaggtattgtagctggtggtggtactacattcatcgatatcatccctgcattaaacacattggaagctactggtgatgttcaaactggtattaaccttgtaaaacgcgcagtagaagaaccacttcgtcaaatcgcttacaatgctggccttgaaggctccgttgtagttgaaaaagttaaaaatactgaagctggcgtaggtttcaatgctttgactgaagaatacatggatatggtaaaagctggtatcgtggatcctgcaaaagtaacacgttctgctcttcaaaatgctgcatccatcgcttctcttgtattgactactgaaacaatcgtagctgataaagtagaagaaaatgctgctgctcctgcaatgcctccaatgggtggcatgggcggtatgatgtaatcagctgcttttagcgatacatagataatatattaaaatcctaatgaatgtagattgctacattcattaggattttttattcttcgaatgggtcttgataaattgatttcataagccatttatggtataattctatagaatttcatataagagtcttggtttgacagacactagtatatagcatataatttttatatctaaaaatatctatataataaagaggtgttactatgttgaactttttatttaaaagtaaacctgattatattaattttgggcttttattctatcgccttgcattaggtatttccatgttctatcatggatacttaaaatatgtaagtggtgaacaaggtctttataaggtaggggccatgttgtccgccttaggtgtgccaagtggctttgaggttatattaggtaccatcgcatcttatgcagaaatggtcggcggtattcttcttattataggcctgtttacacgtattggcacgcttcttgttgtaggtaccttggcggtagcgaccatattgaatcttaacggcaatttctttagttgggattatccgtcccaaatggcctttggcgccattatgttgttctttgctggtgcaggtcgctatagtttagataaggcattatttaaataatcagttaattagaagactcatcatagatgagtcttttactatgtagagaggttattatgaatcaaaaaaaagttccatttacatctgaacaattagaagcaattattgctaactatccgactccatttcatatttatgacgaagaaggcatcgttaataatatgaagagatttatctccgcgttctcttggaataagggatttaaacaatattttgctgtgaaagctactccaaatccatatattatgcgtgtgttgcaaaaactaggggtaggcgctgattgttcttccttagccgaattacttctatgcgaaaaggtaggtatcactggacatgacattatgttcacatccaatgacacaccttatgtagagtataaaaaggctttggatgtgggggctatcatcaatttagatgatattactcatattgaatacttagaaaaacatcacggatctcttccagatacattctgcgtacgttataatccaggtcctttgaaagaagggggcaatacgattatcggccttccagaggaagcaaaatacggtatgactcgtgagcaagtatttgaggcatacaagcaattacaagcaaagggtgtaaaacattttggtttacatactatggttgtatccaatgaacttgatattgatggattggtaggtacagctgaaatctgctttaacctagctgtagaaattaaagagaaattaggcatcgatgttgaatttatcgatcttggtggtggtgtaggcgtagcatataaaccagaacaaacgcctgttgactttgaaaaattgggcgaacgtgttcatgaagcttatgatcgaatcattaaaggcaatggtcttaaggatattgctttggcctacgaatgtggtcgtatggtaacaggcccatttggatatcttgtttccacagctattcacaaaaaggacatctatcgtcattacatcggtttagattcttgcatggctaatttaatgcgtccagcattgtatggttcttaccatcatattacagtaatgggaaaagaaaatgctcctaaagatcatgtgtatgatgtaactggttccttgtgtgaaaataatgataaatttgctattcaacgagaattgccaaaaattgatattggtgaccgtatcatcattcatgatgcaggtgcacatggtcattcgatgggctttaactataatggcaaattacgttctgctgaattgttactgcacaaagatggttctgttacacaaattcgtcgcgctgaaacatacgatgatttgtttggtacattagacttctctaatttataatattgagaattaaatagagttgagaactactattaataaactataagatatacggatatatagggattttttctaattcctgtatattttagtaggaatatcttgctatcatttagataagaatgtataatgagtatagattgttatgcacatacttgctaaagtggcgagagaatacggcggtatcacccttgtgcgtaccgccgtttttctatgtgactataaagttttaatcatataatcagattatctgatacgaaggagtgaaatattttggctgaattacttcagattaaagatttggaagtgtctgtagaagagaagaaaattcttaaaggcattaatttaacaataaataaaggtgagattcacgtcgtaatgggtacgaatggtgcaggtaaatccacattggcaaatgctattatgggtaacccattgtatacagtcgataaaggttctatcgtatttgatggtaaggatattacagaagatgctgtaaatgatcgtgcaaaagcaggcatctttatgtccttccaaagcccaatttccgttcctggtattactgtagaaaacttcatccgtactgcaaaatctacaattacaggtgaaaatgtacgcgcgttggctttcaaaaaagaattgaaagaaaaaatggatgaattgtcctttgacacatcctatgcacaacgttatgtaaacgaaggtttctccggcggggaacgcaagaaaaatgaaattcttcaaatgtctattttgaatcctaaattggctatccttgacgaaactgactctggtcttgacgttgatgctgttcgcattgtatccgaaggtgttaatcgtttccacaatgaagataatgcagtattaatcattactcaccacaatcaaattttacaaaaattaaaacctgattttgtacatattttgatcaacggtaaaatcgttaagactggtgatgcttcattggttcgtgaaattgaagaaaaaggttacgacgcatacaaagcattagcataggaggcaacatggaagaaagaaagaaaacccaagttgcggatatggaccgtggtgtctatgatataaagaataattttgagtattcctatattgctgatgctgggttaacagaagatattatccgtgaaatttggtctaataaaaatgaaccggaatggatgcttgacttccgtttgaaatccttagagatttacaatcgtatggaaattcctaattggattcctgatatttctggcttagatatggagcatatttacacatatgtaaagcctaaagtagatatgaagggcgattgggatgaagtacctgacgatattaagagcacatttgatcgcctcggtattccagaagcagaaaaaacatctcttgctggtgtaggtgcccaatatgactccgaagtcgtatatcacagcattcaagaagatcttgtaaaacaaggcgtaatttatactgatattgaaacagcacttcatgaacatgaagaaatcgtaaaaaaatactggatgacattgattcctcctacagatcataaatgggcagctcttcatggtgccgtttggtctggcggttcctttgtatatgttcctgcaggcgtgcaagtggatattccattgcaatcctatttccgtttgaatgcaccaggtgctggtcagttcgaacatacgatgatcatcgtagaagaaggtgcaaaggtacactttatcgaaggttgttctgctcctaaatacgatgtatccaatcttcatgcaggcgcagtagaattgttcgttaaggataacgctacgttgcgttattccacaattgaaaactggtctaagaatatgtacaacctcaataccaaacgttgtgttgtaggtaaaggcggtactattgaatgggtatctggttcctttggttctcacgtatcctgtttgtacccaatgagtattcttaatggtgaaggtgctcatgctgagtttacaggcgtaacatttgctggtgaaggtcaattccttgatactggttgtaaggtggttcacaatgcaccatatacaacaagtaatgtaaactctaaatctatctccaaatccggtggcgctgctatttatcgtggcctgttgaaaattggtcctaatgcagaacatgcaaaagcaactgtatcctgtgaatccttgatgttggatgaaatttctcaatccgatacaattccagctattattgtagaaaatgataatgtcgatttaggtcatgaagctaagattggccgtatttctgatgaagctattttctaccttatgacgcgtggcattagtgaagaagaagctcgtgcaatgcttgttcgtggtttcgtagaaccaatttctaaagaattgccattggaatatgctgttgaaatgaataatctaatcaatcttgaattagaaggttctatcggttaaggaggtactatgagcgaattactatttaatgaacttcctagacctacctttagatggttgcgtgttaaccatactccagcaagtctttggggagaatcagacaaaactacagctgtattggtaaaaggtaatgatgccattataagcccattgccagctggtacagctttgatgaatacaaactataaaggtgctaatggtgaggctgtagctaagcttgtaagcgaagctgaaggctatcgtatccacgtgcctgctaaggcaaaagaagtggtgggcattcgcattgatgcgagtgcacgtatcgctagtcgtttccaatttatcgtcgaagaagatgcgcaagtagaagtacaattcttcttagatggcggtacaaaagaggcgactaatatccaatatcttaatgaatacgatgtaaaatctaatgccaagattgtcgttaaaaaagtaaatcttttagacgaaactgtacagcatatcgaacatcgctatacaaaactagaggataatgccgatgtggaatacatcaatgtagaaattggtggcaaagaaaacttcctaaactatgaacatgatttacaaggtgaatctagtaaaatcgttcatgacattgcttatttaggcaataaggaacaaaaatttgatattgctatgctcatgacacatggtggtaaaaaatcttttagtgatattcatacattaggtgccttaagcgatacatctaaaaaatccttccgtggtacattggatttccttcgcggtgccgttgcctctgaaggtgctgaagaagatacatgtttattgttagatcctactgttaaatctatttctctaccattgttattgtgtaaagaagataatgtagtaggtaatcatgcagctagtgcaggacaaattgatcaaaataaattgttctacctcatgagccgtggttttagtgaagtagaagctaaacatattattgtagaatcaatgattcgaccaatcatcgatcgcattggtgatgacgtgattgaagaagctgctttgattgcagtacgtaataagatttaagaggattgactatgagacctattacagaagcatataaggattttcctattttacataaagaacataatggtcatcgccttatctacttagatagtggtgcaacggcgcaaattcctcaaatggtaatggatcgccttacagaccatatgcttcatcacaatggtaatccacatcgtggttctcatatcctcgctattgaagcgtcggaagcgtatgaaaatgcacgtgaccgcgttgttgagtttatcaatgcccgtgagcgagaagaggttgtctttacccgtaatagtacggaatcgatgaatctaatcgctcatagctatggcgctaattttgttacaaaaggcgataagattgtcattactgttgcagaacatcatgccaatcttgttacatggcaatatgttgctgagaaaacaggttctacattagaatatatgtacttagatgaatcgggccatttgaaagatggtgaaatcaataagattgatgaaagcactaaaattgtggcatttgcccatgtgagcaatgttcttggcatggaatttcctgtgaaagaattgactgaaaaagcccattctgtaggggctattgtggttcttgacggagctcagtctacacctcatatgaaggtagatgtacaagccttggattgtgatttcttcgtattctctggccataaaatgtgcgcttctcaaggtattggtgtgctatatgggaaacgagaattacttgaaaaaatgccaccatttttactcggtggtgatatgattgaatatgtaaaagaacaatctactacattcaatgaattaccatataaattcgaagctggtacaccaaatgctcatggtgctgtaacattacatgccgctattgattatctcgaatctttcggcatggatgctattgaggcacatgaagaagaattggtatcctatgtattgcctaagatgcttggaattcctcatgttcacgtattgggatctcaaaaccctcgtgaaaaacatggcgttatcgcttttacaatagatgatgtacatcctcatgatgtagcgactatccttgattctaaaggtatctgtgtacgctctggacatcattgtgcacaacctttgggcgcattctttcacgtagctgcatctacacgtctcagcatgtatttatacacgcgtaaagaagatttagatgcattcttagaagtattaaaaactgtccgttcggtaatgggctttaaagattaggagacattcacatggaaatggatcaattgtatacggaacttattttggaacataatcaagataagcgtaataaacgtgagttaagtgagtttactgcttccgaacatggccacaatccaagttgtggtgatgatttgacgctacaaattgatgtacaagatggcattattaaagatgcagcttacacaggctctggttgtgctatcagccaagcttcagcatccatgatgattgatattatcaagggtaaatctgtagaagaagcattgcgtttggtagaattattcttgggtatgattaaaaaagaggttaccgacgaatctaaacttgaagatttggaagatgctatggccttacaaaatatttctaatatgcctgctcgtgtaaaatgtgctgtattagcatggcatacattaaaagaggctttaaagaaataattatgaataagaccattatttttgacttggatggaaccttaacagattcagaagaaggaattttgaagagtgtcacatatgcacttgaatcctttggatatgaaattccacctcatgaaacattgttattattcttaggccctccacttgtagactcatttcaagaacactgtggcatggcattagaagaagcagaaaaagtatataaaaagtttggtgaacgctatggtaccattggtaaattcgaaaatcaattgtatcctaacatcatcgacctattggacaaggttaaaaatgaacattatactgtggctttggctacggctaagccagaagtttatgcacgcgagattttagatcatttttctattacacaatactttgatgtcattgtaggagccaattacaaagaaggcttggttcataagaaagagattctacaaaaggctatcgaattgtgtggtaatccattaactgatgatacgggacgtcgtctcgtatacatggtaggggatagaaaatacgatgttgagtcaggcaatgaattaggttgtatatctataggtgttacctatggatatggtaccgaaacagagttaaacgatgcaaatgcagaatatctttgcgatgatgtagatgatattgttatgaccttggacttagaggaaatgcttgttcgtagataagactattaatgtttatattaaaaggctagggattcgtctctagcctttttgacgcagtaaaaagaccttgttcgtattgagcaaggtcttttagattttcttatgttatttttttaggccactttttttagctaatgatttgataaccttagcgctttgttttttgagtttgcccccagtttgttttaattggatacgtgtacggaatacgcgaccaagtgttgtaattttggttttgcgacgcggtttcatatcgcgttcgttaccaaaatcgccacgttggacagtggttgcttttaccttttcagatccaaatgattgacgtaaggatttcataaattgtgtaagtggtagagtacgattgaaggcgaataaatcaactgctacataacccaattccggatacgcatgtaatgtgaagtgaaattgttttgcaatagcaagaacgacaatttcatcatccataacttgatagtttatttcgtctaactcaatatctgctaactcaaatgcagcagctacactttcttgtacggctgcagcggaagagagggattcttcattgcaagaatataaatctagtaataattgatgacctaatgcatctgccattgtagcaccttctttcgtacatacgttattatatctttaatattatacattgaattcttatattagtctattcgtagaaacatttacgtacatacattgatttgttggagcaattcatgtaataaatttacgtatgttggtaatagtcaaataataatttataaaaatttgactttatatttgacaatagtcaaatagtcaaatataataaagttatattaaaagaacaaaaagacaaattaagagataaatttataaaggggtgttattatgagcgttatagctgataaaatagaaaaatttatacttaataaattaacagaagaacaagaaagattgattttaaagagaaatgagttggccgatgaattagattgtgcaccatctcagattagctatgtattgagtacgcgtttttctaatgaacgaggatttgatgttgaatctagacgaggattaggtggatatattagaattcgtaagttgcaaccagaatcttctaatatggtaccagcagtgacaacctatcatatctatgaaggtccaaatcgcgtggaacggttaatcgatttacgcgatgttgatcaatctttatttcaattgttacaagataataaaattacaaagcgcgaggctcaaatgatgcataattcatttgccagcatcattaaacatgtagattatgaatctagaaatgatgctattcgcaatctttatgcatccatgatagagacattgcggaaggagtgatgtcatatgaaatgcgatcattgccatacaaatgaagcaacagtgcatatgacaaatatcgttaataatcaaaaaacagaacaacatttatgttcgtcctgtgctaataaattacaaaaagatggtaagttatctccatttagttctttcgtaaatgatatttgggacaatgactttttctccaatgattttttcaaaaatatggtgtacccagaccatatgttgcaatcacagcagatgaaacgctgtccaaattgtggaaatacatttgaagattttaatcgatttgggaaatttggatgtcctagttgttacgaaacttttaaaaatcagattgcatcattggttcaacgcattcaagggtcagttgaatatgaaggacgcgtaccaaaccaagggcataatgtgtttaaagcacaatatgaaattaagcaattacgacgtcaattagaaacggccatcggtgatgaaaactttgaagaagcagctcaaattagagataaaatcaaagctttagaatcgaaggtcgatagtaaagaaaattgaggaggatagtatgtttgataatatattagatgcagcccttagtaaatggctccaacatacgccatccgattcagatcatatcgttatttctagtcgtatacgattagctcggaatttcagagacacattatttaccaataaaaatgatggagccgctctacatcatgttgattccattgcacgtggtttggttactacgttaaaaaattccgataatcaagattattactgtattagtcttgataaattatccgatatagagcgtgctattcttgtggaaaaacatttgattagtcctgttatggctgaaaaaatgccatatcgtagcttacttgtatccgatgacgcatcggtagcaattatggttaatgaagaggaccatttgcgcatacaaactatggaggcgggcctgaatttaatagatgcttttcaccacgcagaacgcattgatgatgctattgatgagaagcaaccatttgcctttaatgaatcttttggctatttaactgcatgtccaacgaatgtgggcaccggtctacgcgcctctgttatgctacatcttcctgcgttagcaatgactggacgcattaatcgtctcgttcgcagtattgttcaacttggttattctgtgcgcggtctatatggcgaaggttctgaagcgttaggtcatatttaccaggtgtctaatcaacgtacgatgggcatcagtgaagctgatacaattgagcaattgacgaaaattgtagaaggaatcatagcagaagagcgaaaatgtcgccaaacattggttcacaatgataaagatggtcttgaagatcatttatggcggtcctatggtatattgcgatatgcaaggtctataagcggtcaggaatcgctagaaaaattaagcgatgtccaattaggtgtagatttagatatcttacctacatggtcgagcgatagttttaatgagttggtggctattacaagatccaattttttacataaatatatgggaaaagaagaggcaagccctcaagaacgcgataattacagagcaacagtaattagagaaaagctttcacaaaaataatggtcattcctattttatgtgatgttgaaaaataccattcatggagatactccatttaatatagatttacaaaaagtaccttcatttaatgaatgaagtttatatagagagcgcaaactgatgtttgcgaacgaggtaatacatatgatgcaacgatttacagatgatgcacaacgagtgttatccttcgcccaagaagcagccttggaactagggcatgactatgtgggtacggagcatgtactcatagggctcataaaggttaaaaatggtgttgccgcaaaggctcttaatgagctaggtctaagtgcagagaccattattgaagatgttgaagagcacattggacgaggaaataagaaagctagttccgtatatatgacacctcgtgtaaaacatgtgctagagttagctgttgaagtagctaatcatatgaaccacaattatgtgggaacggaacatattctcttagggttgttgagtgatggtggtggcgtagcagtcggcctattacgtaatcataatattcgcgctaatgacattgttgaagtaattcgagatattcttggatcttctggtagaactagtcataatagtgaagataatcaagacagcagttcattaggagatcttgccgacttcggaacagagttaaatgaatctgctaaacagggaaaaattgatcctgtgattggtcgagataaagagatttccagggttattcaaattctgagtcgtcgtaccaaaaataatccggtacttatcggtgaaccaggtgtaggtaaaactgctattgcagaaggcttggcgcagcgtatcgtaaatggtaatgtgccagaaatattacgtaacaagcgaattatttcactgagtatcagttcgatgttagctggtgcgaagtatcgtggcgaatttgaagaacgattgaaaaaagcaatcgatgaagttcaaaaacatgacgatatgattatattcatcgatgaaattcatacattagttggcgctggtgccactgaaggtgccatggatgcagcgaatattttaaaacctgcattagctcgcggtgagttccaagtaattggcgctacaacattggatgaatataaaaagcatatagaaaaagatgctgcattagaacgtagatttcaaccggttttagttggtgaaccttctgaggaagatgcgctcgaaattttaaaagggctccgtgatcgatatgaggcctttcataaggcaaagattactgacgaagcattggaagcagcggtttcactatctagccgatacatcacagatcgatttttgccggataaggctatcgatgttgtcgatgaggcagcgtccaaggtgcggatgaaagtgttttctgccgcacccgatgtgaaagcattggaaacacaattagcagatgtaaaaaaggaaaaagaagctgctgtaactgctcaagaatttgagaaggcagcagagatgcgtgatgaagaaaagcgcattgaaaaggaaattaacgataagaaaaaggccgctaaggaaaacagtgatgctaagttagttgtgactgacgaagatatcgcttctgtagtagcacaatggacaggtatccctgtttctaaaatcgcacaggaagaatctgaatcattattacacttagaagaagagcttcataaacgcgtcatcggtcaagatgaggctgttgtggctgtttccaaggctgttcgccgtgcgagggccggtctaaaagatcctaaacgtcctattggatcgttcctattcctaggtcctactggggttggtaagaccgaattggctcgtgccttagctgttgccttatttggtgatgagacggcgatgattcgtctagatatgtccgaatatatggaaaaacataccgtatctcgcttagttggtgcccctccaggttatgtaggctatgaagaaggcggtcaattaacagatgcagtacgccgtaaaccatatagtgtgattcttcttgacgaagtagaaaaggcccatgcagatttctttaatatcttattgcaagttcttgatgatggtcgattgacagatagccaaggtcgcactgttgattttaggaatactgttatcatcatgacaagtaatttgggtgcaaatgcacttcgtaagagttctcctgaacttggattcttagctgctaagaagtccgatagtgcatctgatgtttctaatgagatcaactttaagaaagccaaaaaatctgttatggatgcggtaaaacgtcatttccgtcctgaatttttgaatcgtatcgatgaaatgattgtattccatgctttaacgtcaaatgatttaaaacaaattgttacaattttaatggatactgtagtaaaacgtcttggtgatatgggactatctctggaaatttccccagcagctatggatatgcttgtgaaagaaggatctgatttctcaatgggcgcacgtccattgaaacgagctattcaacggttgattgaagatcctatttcggatcttattttacaaggtaatgctcctgaaggtgctaccatcaaggccgatgtagaagatgaacacattattgtaaaagcttctaattaattgggaatagatattgttctcatacagtcttttatgtaaaatttaatgtcaaaatggtatactattagtgataatagttgaccgtagtattaattatgcacaaaaggtcatgagtgaattatcattcatgaccttttacttttcatgggggttgtatggcaaaggtaaaaaccgttttcttttgtaataattgtggtgctgaatctgccaagtggatgggaaaatgccctcaatgcggtgaatggaatacactggttgaagaagtggtaaaagatactaaacatagtcgtacaccgtctgtacgtggtgtgggcaccaatacgactaaacccgtggcattgccagatattgaaatgtcagcagtatctagaattcctacgacctataaggaaatagatagagtgcttggaggcggtattgttccaggtgcgttaatgttattaggtggcgaccctggtattggtaaatcaacactgcttttacaagtctctcaaaaggtggccgatacagttggtactgttttatatgcatctggcgaagaatcacaattgcaattaaaattgcgggctgaacgattacatattaatagtgaacgattacatgttatagccgacacagatttagatcatattcttgaggtcgcattagatcaaaagccatccttactggtcatcgactccatacaaacaatgtttactgcagatatcgaggcagcacctggtagtgttagtcaagttcgtgagtgtacatctcgtttattacgattttgtaaggagcagaatattcccaccattatcattggtcacgtaacaaaggaagggaatattgcagggcctcgtatgcttgaacatatggtggatgtagtactttattttgaaggggaacgctcttatcagttccgcatattacgagccattaaaaatcgttttggatctacatcggaaaccggtatttttaccatgattgaagatggtttagcagagcttgctaatccgtcggcgtccttgttagctgaacgagctgatgatgaaagtggtagtgcggttatgatttatctagaaggggttcgtcccattctggtagaggttcaaagtttggtagctacaacagcctttggaatgccaaggcgtacggctattggctatgatttgaatcgtctaattgtgctactagcagtattggaaaaacgctgcggctttacgttgggcaataaggatgtctacgtcaatgtaatcggtgggttaaaggttaatgaaccggcttgtgatttatcgatggccgttgccattgtatctaatttaaaaaatcgcgtagtgcctcatgacatggtgattcttggagaggttggattgaccggtaatgttcgtagtatcccacgcatagaacaacgaattaatgaagctaagaaattgggctttacaaagtttattatcccagaagggaactataaacaaattaagcacgatgataagtctattcaaatccgtggtgttacgtcaattgcacaagcgatgcaactcgcattttcttaatacatgttatagttcatagaaggctaattcattgagtataaaatctatggtatttgaaggaggtgatgccatgatttatggtattttacggtatgtgattgctatccttatcggtacggctgcatacgtaggtatggacaatttagcccctattattgatccttatttagtatctcaatttgcaagctttggagatatgtcgctcactgtagcacgtatttcagttattgtgcttggtacgataattggtattttaataggctattttatttcgtcctttattttaaaacaaggtttagtcattgctagacgattggaacgggtattaacacatattcctaaccaagaattgattgcaggcaccatcggtttattatttggtcttattattgctaatttaattggtgcagcattcaatcaggttcctatcattggaccgtatatttcaatcatcttaagtgccatttttggctatagcggtgtgcgtttgatggcccgtaagggacctgaaatgtatcttaactatttaaagcaatggaaacgcagtgaagcggggactaaaaaaagtagaggcttcaacatgtttggatctcacaagtccagtgactcaaattcaactgcaaagttattagatacttctgttattattgatgggcgtattaaggagttgtgcgctactgggtttattgatggcccattggtagttcctgtctttgttttaaatgagttacaaattatttccgactccgcagatgcgatgaaacgaaatcgtggccgtcgtgggttagatattttaaaagaaatgcaggatgcaaaacttgtatctattgaaattgtagaagatgactatgatgatctacacgaagttgattctaaactcatgcgattagctttagagaaacaatggaagcttatgaccaatgattttaatcttaataaggtggctcgtgtacaaggcattaaggttttaaatttaaatgaattagccaatgtgttgaaaccggccctcattgcaggcgaatggattcgcgtacaagtaatgaaggaaggtaaagaggttcaacaaggcgttgcctacttagatgatgggactatgattgtcgtagaagatggtcgcccgtatgtaggtcaagaggttgaggttatggttacatccattttacaaaccagtgcaggtcgtatgatttttgcgcgtgtagatggaggtaagcatgagtaaggttagctgtattgtattagctgctggcgcaggtcgccggatgggtcatgatgagaacaaaattttcattaaacttggcaataaatcgattattcaatggacgttaagtcatattgaacaagttaaagcagtgagtgaagtcattctcgttgttgctgacggcgaagcagcctatatgaagcagcatattgcatcattagggctttcaaaatcaattaaaattattacaggtggcaaagagcgtcaagattctgtgtatgcaggtttacaagcggttagcgatgatatggatattgtcctcgttcacgatggagctagacctttagcaaagccagagttatttaaaagtgttattgaaggggccaagactcatggtgctgtgactataggtgtaccatctacagatacgattaagcgtgttgatatcgatggacaggttttagaaacattgaatcgtaacgagctgatgaatattcaaacgccacaaggtttcctaaaaaatatattcaaagaagctcaggaaacggctaagcgtgatgcttatttggggacggacgacgtgtccttagttgaatatatcggtaaagatgtgtacattttagaaggcgattatgagaacatcaaggttaccacaccaaacgatatagcggtggctaaacggtatttaggaatcaaggagcaacagatgcgcgtaggttttggatatgatattcatcgattgaaggaaggaagaccttgtattttgggcggtgttcatatcgaatcgcctgttggccccgatggtcattccgatgcagatgtattgattcatgcgctgatggatgccttacttggtgctgctggtttaaaggatatcggctactattttccaccagaagatgatgcatataaaggaatttctagcatgattttattaaaacatgtgaattccttgttgaaagaaagaggcttagaagcctataatatagatattatggttatttctgaaacgccaaaattaaagccacacatcgatacgatgaaggctaatttacaatctgttttagaaattccattagatcgcattagtattaaggctactaccaatgaaatgcttggtgccatcgggcgccgtgaaggtattgcagcacaggcagtagtttccgtatatgaaggagaggtttaattatgaaggtacgttttgcgccaagtccaacaggtccatttcatattggcggtgctcgatccgctttgttcaactggctattagcacgtaaggaaaaaggcacgtttgtacttcgcatcgaggatacagatttatctcgttctactcgtgaaagtgaagaaaatattaaagcatctttgcaatggctcggtatgaattgggatgaaggcatcgacgtaggtggtgaaaatggcccttatcgtcaaacagaacgtcttgatttgtataaagaagtaacacaacgcttacttgatgaagataaagcttatgaatgcttctgtacagctgaagagcttgatgaagtacgtcaggcgcaaatggaacgcggtgaaacccctaaatataatggtcattgttgccatcttacagaagaagaaaaagaaaaatatcgtgcagaaggtagaaaaccaactatccgtcttcgcgtacctttgaataaaacttatgcattcgatgatatggttcgtggtcatgtatccttcgagtccaatggtgtaggtgactttgtaatcgtaaaatccgatggtattcctgtatataattttgccgttgtaatggatgaccacatgatgaaaatcactcacgttattcgtgcagaagaacatttatccaacacacctcgtcaaatggccatctacgaagcacttggttgggacattcctacattcggtcacatttctttaattcttggcaaagactataagaaaatgtccaaacgtcatggtgccacatctgttgatcaatacaaacaattgggttacttgccagaagcattagtaaacttcttggcacttctcggttgggctccagaaggtgaagaagaattctttacacaagatgaattgattcaagccttctctatggatcgcgttgctaagaacccagctgtatttgatatcgataaattaaaccatatcaatttccattacatgaaaaacttgagcgatgaagagttgttccatctctgcttgccacatttgaaagaggtaggcttagctccagatagcttgaaccaagctgacattgattggctaacattactttgctctacattccgcgatcatattagctttggtgctcaaattaaagatcatgtaggcatgttcatgggggaaacagtattcctcgaagaaggtcatgaagaagagttaaaggcagtgcttaacgaagaatctgctccaactgtattgaatgctttcaaagaaaaattggcagacatggatgatgttactccagaagctgttaaaaaagctatcaaggctgttatgaaagaaacatctttgaaaggtaaatttgtgttcatgccattgcgcgttgccttgactggtcaaatgcatggtcctgatttaaacaatattgttacattgcttggtaaagaaaaatgcttgcatcatttagacaatgtaggtgctttaactaaataatagaactattgaaaggctctcataccgatggtgtgagggcctttgttgtatataatgtacagatttgctataattatcggcgtattttattttgatttttatgaaagtgagtgttttgatgagtttaattcgatctattaaccatctcttcaatagctatctatcttggatagttttattgatggccgtattagcttatatgctaccgacattttttgcatggatgacgccgtatgtggcatatatgttacaatttgttatgtttgccatgggcttaacattaactgctcaagtattccttgatgtatttaaacaaccaatgaatgttatcctcgtatctgttattcaatttttatggatgcctttagcaggctttttagtagctctcatctttaacttcccaccagaaattggtattgggtttatcttgctaggtgcatgccctggtggtactgcttctaatgtaatgacattcctcgcaaatggtaatgtaccattgtccgtatctgctacaaccgtatctacattgttggccccaattttaacaccattattcgtagtattgtacgcaggtgcaacatcgtctattgaaattcaatttatgccgatgtttatatccatcgttaaaatcgtattggttccaatcattttaggtatcgtattgaattactttattggatctaaaattgaaccagttaaatctgtatgtcctactatagcggccattgcagtattacttatcttggctgccgtaacagcggttaaccaaaaacaaattgctgaaacaggtctcatcatctttgtggcttgtttagtacaaaacttaagtggctatgttgttacattctttatttgtaaggttcttaatattgatgtatcatctcgtcgtgctatgcaaattgaagtggctatgcaaaactctgcattgtccgtgtcattagcgatgaaacattttacaccgcaagcagctgtggccggtgcagtattctctatcatccataattttacaggctctatttttgccggtatttgtcgtaaacatgacgataaagaaaaattagaacaagcttagtatacaatagagtaggtacatcattttaaaagctttaactgataatacatttcaataaaagatgtagttaaacctccattttcgcaatccataatatgtttaattcccttaataaagggatatattcaatggtacagaagatggaggtttttcttgtaattattgacattatatagcattattggtaaaattattttatatcttaatataggtatatattaaaagctaagattgaaagaagtactctacaactaactttttagcgagaaccgatggtgggagggtttaaggataggtagacgaaatgcattcatgagctgacatcccgattataggtaggtttgtccggtgacgcgccgttatgcgatgagtgggtaccatattggtgcctaacagagtggaaccgcggaccatcgtctctgtatgagatgagggttcttttttatttttcgaatatggaggcatcagtatcgatgagagaaattacagtttataatacaatgacgcgccaaaaagaggtatttactcctgtaacaccaggtgaagcaaagatgtatgtttgtggtgtaacaccatataatcatcctcatattggtaatgctcgtccttttgtaacgtgggatgtaattcgtcgctacatgaaacatgtaggatataaagtaacgtatgtacaaaacttcactgatgtagacgataagattattaatacatctaatggtgaaggcgtagcatgggacgtaattgctaatcgttatatcgatagctattttgaagtaatggatgcacttggcgtagaacgtgctgatgtatacccacgcgtatctactcatatccctgatattctcaagatgatttctacgcttattgacaagggctttgcttatgagctagatggcgatgtgtattttagcgtagaaaaatttgaccattatggtgaattgtctggccgtacattagatgatatggaagctggcgctcgtatcgaagtagatggtcgtaagaagaatcctatggactttgcactttggaaagctgcaaaaccaggtgaaccattctgggaaagtccttggggcaatggtcgtccaggttggcatattgaatgttccgctatgagccaaaaatatttaggtgaagaattcgattttcatggtggtggtagtgatttgattttccctcatcatgaaaatgaaattgctcaatctgaaggctgttctggccatcatccatctgtaaaatactggttacataatggattcattacgattaattctgaaaaaatgtccaaatccttgaataatttcttcttggtgaaagatattttagaacaatatagtccagatgctttacgttacttcttactaagcacacattatcgtagcccattggatttttccgatgaacgtttagaagaagctaacaaatctttagaacgattaggtactgctatcgaaaatcttttatatcttgaaaaatgtgaagctggtccttgtgacgatgctcaacgtttattagaaaaagctaaagaatatgaagaagaattcgaagctgctatgagcgatgatttcaatactgctttagctacatctagcatgtttggccttgctaaggaaatcaacatttattaccaagctgtaacaggccgtgaaggtgttgtttgccaagaagcaatcgctgaagtaaaacgtatcttcaagtttatgacagaggtcattggcgtattagaaaaagcttgggaaggtaatactggtgctgatgctgcagaatacgaacaattgatggacgttattctatctgttcgccaagcgtgccgtgaacaaaaacaatgggctcttgccgactgtattcgtgatcgattagctgaaattggtattactattgaagattctcctacaggagcacggtggaaaaagcgtgaaatttaagcaatttcaatttctgaaacaagaagctataaaaaaattaatactcttagatacggaagaccattcttttgtatctaaaccagcatctgaagtattagcttcagatgctgttatgttggcctatattggtgatgctgtgtattctatgtacattagacaacgtgttgtagaaatgagtatttcaaaggttcaggttctacatacattggtgaccgaatttatttgtgcaaaatctcagtcaaaagtattggatcaaatagaatcaatgcttacagaggatgaacaaataattgctagacgagctcgaaatagtaatgttaatgtacctaagagtagttctgtacgagaatatcggaatagtaccgcctttgaagctgtccttggtttcctatatgaaacaggtcagcaggaccgacttaatgaattgatgaaagaggcctattctattacattaagaggactttcacatggataattatattgtaggcagaaatgccgtaaaggaagcattaaaagcaggccgttctatacaacgcattttggtgagtgatgataaagttaaaacgggtttatctgacatcgtaggactagcaaaatccaagggcgtagaggttcgtcccacacctgttaaacagatgaatcgctatgaaacggatgtacctcatcaaggtgtcattgcttttgtgaatgctgtagaatttaaagaccttggagaagtactgcaagagtccaatcatgagaatccactacttatcttaacggatggcgtagaggatcctcataatatgggggctattatccgtaccgccgaatgtgtgggggccacagcagttttgattccaaaacgtcataatgctcctattaacgcaacggtcgctaaaacatctgccggtgcggtagagcagattccactcgttcaagtcggtaatgttacgcaaacgattaaacagttgcaaaaacaaggattctgggttcttggcgcccatatggatggtgatcgtactttgtatgaagccgatttaaccattcctactgtccttgtcatcggcaatgaaggtaaggggattagccgtgtcgtaaaagaagcttgtgatttcctagttaccattccgatgtatggcaatttaaattctttaaatgcatctgtagcagctgctattctcatgtatgaagcagttcgacaacggaccatgaaggtaaaatagaggtgctgcatgctaaaggatattttaatcgtcgatggatataatgttatcttcgcatggcaaagtttaaaaaaactggctaatgaatccttagaacacgcccgcatggaattgcgtaatcaacttttaaactatggtaaatttaaaggttatgaggtcatactcgtttttgatggtaaatatactaagtctatagcgagcatagaagaaatcactaaaggatttattgaagtatatacagatgatggtgaaacggcagattcttttattgaacgcgaggtattcttacggcaaggcaagtataccaatgtttatgttgtcacctcagacggagccgaacaaaatcaaatattaggttctggtggacttcggataccagcaagagaattacaaaatgatatgcgtcttgccaagcaagaggaacgcttgcaatatacacataaacatcatcgagaccaaatggtactcaggagaaatgaagtatatgaccacttagatcctgatgtggctgaaaaactagaagccatacggagaggtacaaagtaagcagaacagatagacctactgtagtagtatgaagtacattctatttcataaatattgcagaacatatataattcaagtataataacatatattggtatttctacaatatgtgattgtatggaggacctatgaacaattttcatacgcaacagtccgattacaatttcagagaaatgactgatgagcaagttgtggtcatagctcaacaagagcaaaatgagtttgcaatcgactatatagtcaataaatataaaaattttgtgcgcgctaaggcgcgtacctattttcttgtaggtgccgatcgagatgatatcattcaagaaggcatgattggcttgtataaagctactcgtgattttagacatgataaattagcatcttttcgggcctttgcagaactatgtattacaaggcaaattattacggccataaaatctgcgacacgtcaaaagcacgctccactcaattcttatatctctttaaataagcctgtgtacacagaagagtctgaacggaccttgttagaaatgctttcatcagcacgaagtacaaatcctgaagacctcattattagccaagaagagctagatgatatcgaaaaaaacataggacatattttaagtgatctagagtggcaagtgttagaaggctatttagatggtaaatcatatcaggagatggcaaaaggtactgaccgtagcatcaagtcgattgataatgctttacaaagggttaaacgtaaattagagaagtttttggaacatcgtgtattagatgttcctacacaggaaggatgactattgtgacaaattttttgatggttttagaaatcattgtgtccattttattgattgttgttgtaattgctcaaactagtaagagttctggtatgggcggcgccgtttctggtgcggcagattctacattcggtggtaaagaacgcggtttagatgggttcttatctcgctgtacaatcattttaggtattatctttgctgtgttgagcttagttctaggggcaatgattaaccaattctaatttgaaagcctgcctagcaggcttttctttttttcagcatatatgaatactatgcaaaggaggtgtttgtatgaaagaaaaagtgttagcgttttataaatctatttatcctcatacgtatcatatcgatgatgctgctatggattgtcatattaaaggcggacgtgaactggatgcctttatggatgccgcaaaagagctattaaaagaggggcgcttaagctttatacgaaaagatgtatatgcctataataatgatacagaatttattgaaggaatttacaagggatatagaaaatcctttggatttgttattactgctcctgatgaagaggatgtgtatatagcagaacaaaataagggcactgctatgcataatgataaggttcgtgtacgtattatcacatctcgtgattcacgccataaacgagaaggtgttgtcactgaagtcatagaacgagctaatgaaactgttgtaggtacctatgacagacaacaatcttttggttttgtcattcctgatgatgaacgattgggtacagatatttatgtcgatttacataataccctagatgctcgcagtggtgctaaggttctcgtaaaaatcatcaaatggccagaaggcgataagaaaccagaaggtgtcattacagaagtattgggctacaaaggggatgtaggccttgatatcaactgtattatggctaattatgacttgccattttccttcccagaagatgttgtgaaagcgagtcaacatatcaatacgaccattacagatgatccaaaacgttgggatttacgcgatgtgccaatggttactatcgatggtgaagatgcaaaagaccttgatgatgcagtcagtggtcgtaaacttgataatggtaactatgaactaggtgtacatattgccgatgtaagccattatgtagtgtcacaaaaggctatcgatagagaggcctataaacggggaacatccgtctatctagttgaccgagttatccctatgttaccggaggtgttatccaatggtatctgtagtttaaatgctggcgaagatcgatatgccatgacctgtatgatggaaattgatgcacatggtaaggttgttaattatcggattcaaccatctattatccatgttaatcgccgttgcagttataaagagatttataaagcattaaccgaagatattattcctgatgacttggcacctcttatgctgatgattcacaatttatccgacatcgcaaaaactttaaatgatatgcgccgtcgtcgtggtgcactggattttgatttccctgaatataaggtgctattagatacagaaggcacgccattgcgcatcgtacgtcgcgaccggacattagcggaacgacttattgaagaatgtatgcttatagctaatgaaacggtagctactcatctaaagaatacaaaccgtacgagtgtatatcgtatccatgaaacaccgagcgaagaaaagatgagtatgtatcaaaaggtactcaattacttaggtcaagatattcgactacatcttgatgaattggaaccacgcgtgttccaacatattttagatgctgttaagggcacggatattgaacaagtggctcaaatcatgacattgcgttccatgcaacaagctaaatatagcatcgataatgcaggtcattttgggttggcgtcgaaatgctacacgcactttacatcgcctattagacgatatccggatctcatggtacatcgcttattaaaagccgatatgggatggcctgatggatacgcaaaccgcgatacgaaaacagaatttttagaacgtgcggctgtccattcttcagaacgtgaacaagtggctgttgctgctgagcgtgatacagttgatttaaagaaaactcaatatatggttccatttattggcgaagtatttgaaggcaaaatttccagtatcacatcctttggtatgtttgttgagttagataatggtatagatggccttgtccatatgaacatgatgaccgatgattattacttctacgatgaagaacatttcttactcgttggtaaacggacaggtcaaatctatcatttaggtgatacagtaacggtgacattggtgaaagctgatgtagaaaaacggcaaatcgatttcgttcttggcgaagtggataatcttatgagaattcaagaaatgatgaagaattccgaaggttatgtaggctctagagaaaagaaaccgtttggccgttctggtatctctaaacaatcaaaacgaaaaggtaagggacatagtaagtcttctaaacggagagacaggtatgctggcacatctagtgctccaaagaataaaaagggacgtaaagaccataaagggtctaagaaaaaagtaaaaaaacgtaaacgataatgaaatattaatacctactgtgaggtgactatggcaaaaaaagatgcaccatcattaattgcagataaccgcaaggcgcgtcatgattttaatattcatgaaacctatgaagctggtatcgcattgacggggacagagattaaatcaattcgccaaggtaaattaaatcttaaagatagctttatccgtatagataagggagaaatgcttctttatggtgttcacattagtccttatgaacaaggcaatcgctttaatcatgagcctgagcgaacacgtaaactattgatgcataaatcagaaattaaaaaattatttcaacaagtgaaagaaaagggattctctttgattcctttgaattttcattttagccgtggctatgtgaaggtaacggttggtcttgtaacaggcaaaaaattatacgataaacgccaagatatggcagaacgtgatgcaaaacgagacattgctaagcgtttgaaagaacaacaaaaatactgatatataataggaggatgtttagtggaagttaatcaatacttttatagtttggcaaaaatatcagcccaaaaagcagctgaaaatggagtgcatgtagatccgaaatttatatatactcaatggtatattgaaacaggtgggtttacatctcaactacaagcaacacatcataatctaggtggtgttacagcatcagatggaagttggagacattttacggattttattgattttgcaaactattttggcaattatttgacatactatagagaagatggcatgacaaatgctacatctttatattcgtatatcaatgccttgtataatggtggatactttacagcagattttaattcctattatggctctgtattacaagtatttaatacaatcaatttctaaacatgttaagggactgtgttacagtcccttatttttatgcatattgttaacttgatacaaaatataagttgataaatatcacatatttttttataatgtaaacaaagtgtgatttatttagttgacaatgtaagtgcatgaagaggtgaatactatgagtcaaattcgtcaaatcacagaaatcggtattctaacagctatgattacaatcttgggagctatcaaaattcctaatcttgtgccgggtattgagttccagctatcggctccgctagcggtagcaatttgcgcggcctttggatttaaaaagtacatcatcagcggttgtttatccagccttatcggattggcattggggacgcaaaattttctaagtgttgctattgctatgcagtttagattggtcgttggtttcttattatggatttgcaaaaatcatatgctcggtgtaatcctaagtggtcctattgcatctacagtggctcgattaacactatccgtctatgttggtaaaggtgctctcgctatggttatgcttgctgtacctggcatgatctttaccgctattgtggcgcctattatgactgctgtatttaaaaaggttgtatcagcagctacacatagtgcacctcgaaaggttgtgtaatgatggggctatatagtattcgtatgcgcggtgcagaaggcggacctcatgaagaagggggacgccatatatctggggctgaacgcattgtggaagaaagtgatttagaatctgtagcatcctctttaattcatcgtgcattgcatcatagtaaaggaaaatcagattttataaatattcgtatagacgcggttcacgatgaggatattacatatgttgattgtattgatgttgatgaacatgagactgcatcggtaaaagaatcacatgaattagcaaaaaacttactacagtctgtagtgagccataaggcagtagaaaatgctttcacagaactaggccaactaccaggtaatatgcgtggtgccattctgatggatgccaatacaggtgtgcgattggatcaagatactatgcgcggtgttcgcgtaagtcatatggatgcgtgtggcaacgaaacaagatctatgaatgtgcatatgcgtgaagcactagtactagccacaaaggtgcagtcatgtcctggtattgtaggtgaactttgttggtccgacgatccagattatacagttgggtatgtagcatgtaatggcatatatcatcgcattccgaatatgaaagaaatgggaaatcctatcgggggccgtgtattttttgtagatacaaataggcctattcgtgaaattgttgattatttagagaatacaacagtattggtacggtggtagcatggattattatcaagactttcaaaaaaaactagaggctaaggagcaagaacaaaataaaagaacgattaagacctacgagcccttagatgcagtacgtgtaaaacgcaatgatagcgagtatatcatgatggcatctaataattatttggggcttacccatgaacctcgtgtacaacaagcggctatgcaagcaattcaacgatatggcaccggctctggtggtgctagacttacatcaggatcgtttccattgtttaaggaattagaaatcgctatagccaattttaaagaaacggaacagtcacttgtgtttaatacaggttatatggctaatgttggtacgattacggccttaatgaacaagcatagcgtcatcattagcgatgaattaaaccatgctagtatcatcgatgggggtcgcctcagtggagctcatattgagcggtataaacataaagatgtagaacatgctgaatacattcttaagaattataaatctgcgtataaaatgatcattactgatggtgtatttagtatggatggagatattgcaccattagataagctgtatgagttaagtaaggaatataatgctcttcttatggtagatgatgcgcatgcgaccggtgtcatcggaaatgggcgaggtacggctcatcattttggtcttaccgatgtagatgtacagcttggtaccttgagcaaggccttgggttctgttggcggctacgtggcggggcgtaaggaattgatagaatacctgattaactatagtcgtagctttatattttctacagctttgtccccggcggatatcggtgcggctttagaggctctacgaattgtacgagatgaaccatctgtggtcgatacattacgtgataatactgtgtatatggcacataaattacaggctatgggcattgattgtgatgatgaaacaccgatattcccgattgtggtaggcgagaatgatcgagccttaacattggcccgtgagttagaagaacgaggggttattattacagctattcgacctcctacggttcctgttggtgaaagtcgcctacgcatgacggtgactgctgctcatagcaaagagcaacttgattatgtcgcaaaaacgctacatgaattactagttgacatgaatatacattaggggtatgatagataaaccaacaaacccatggggatgtaaaggtttcgacaggggcgagtgtggtatagatagcgagtcggcgttccattgggccgttaaacggtggaaaaacatttaaacgcagaagaaaattttgcattagctgcataagctacgtccctcatacttgtgcctaccaagtgtgaatggacgtcaaaccgtaggctggcttaatttagttgttcatatgaattaggcgagacaacatgaactggagtactgtagtttgtctgtgagcgataggtacttgagacttaaatcatagactgtgctcggagaggtctatatggcaacgcttttggacaggagttcgactctcctcatctccaccatgagatgattcataccgaagattagtatcttgtaatgatactaatcttcggtatttttttgttttgtacacaaattgttataaaagtcaacaatatatggtgtgaaattgtacgcaattgaatatttaaaaatatagataatatctagctttattagaggtttataggatatagaaatcttgactatcccatgggaataaagtacaatatatttagaaatttatgaatttggatcttataaatttagtgttatgaaaaggagtacatgtaatgaagtctcgatattcacgcatgttagcagtattagcagtatccgctttactggtggcaggttgtggtaatcaacaacagcaatctgctgatgtggcggtaaattcgtataaaatcgtatcgcaaaacgcacaagttgatcaaacctatacaggtacggttaaggcagaaaattctgtggctgtacatgctcgtgttactggttatgtggtggaaaaatttgttaaaggtggggaccaagtagtagctggtcaacctttatatcgcatcgattctcgccaatatgaatccaatgtagcaacagcggaagctaatgtagcaagagctaatgcagattatcaaaatgcagaaactgatttaggtcgttacgaaacattggcaagtcaagacgcgattgcacgccaacgcgtagatactcaacgttctgctgcagaacaagctaaagcagctgtagaagcacaacaagcagcattgaagattgcgcaagataacttgggtgacactatcatttatgcaccatattccggcacattgagcatggatgctgttgatataggtacatttgttaatgcaggatccacgacattggtaaccatcgattctgtagatcctattttcgttgaatttagcatgactgaacaagagtatcttgaatttatggctactcgttctggtgatgaaaacagcggtcttaatttgaaattacgcttagctgatggcaaggaatataatcaagtaggttctgttgttcaagcggcaagaactttagatccttctacaggtaagttaattttgaaagcttccttccctaatcctgaccacttattgttacctaatatgtttgctaccgttatttctcctggtgaaaaattaacggatgccattttggtacctacaaaagctattttacaaattatggataaaaactttgtatatgtcatcggtcaagatggaacagtatctcaaaaggctgttgaacttggtggcactacaggggctttcacaatcgttaaatctggtcttgtaaatggtgatgaaatcgttgtagatggtttaactaaggttaaaaatggtgcaaaggtacaagccactgaattgtctaaaacacaaattgaaacagctaaacaataggaggtaagacgtgtcgaaattctttattaatcgacctatctttgccattgttattgccatcatgattacattaatcggtttgctttcaatggttaatcttccggtagctcgatatccacaaatttcaccaccaagtgtacgtgttagtaccatgtatacaggtgctacgcctcaagtactgaatgatactgtagccagtgtaattgagtctcaaattgtaggcgttcaagatttagactatatgacatctgatagtgctagtactggtacatattctttgtcattacagtttaatcaaggtagtgatcccgatatggatacggttaatacccaaaaccgtgtgcaagcggcgctagctcaactgccttcagaggtccaacaagttggtgtaacaacgacaaaatcctctggcgatatggcgtacattttctccttgaattctccaaatggtacctttgatagtacattccttaaaaactatggtacaaactatttgatggatgccattaagggcgtaaaaggtgttggttccgttcaagaattcggttctgactatgcaatgcgcatttggttagatcctagcaagatgcaaaaattaggcattaccatgtctgatgtaacatctgctattaaaagccaaaacgtacaagctgcagctggtacagttggtaaaaatcctaccaatggagaacaagcattccagtatccaattaaaattgatggccgtctagtgacagagcaacaatttggtaatattgttatcaagaactctaatggtactgtattacatttaaaggatattgctcgtattgatgtgggcgcaaaagggtacgattttgtcgctaagtcttcatatcgcgatccaaatgctccatctggtgagattttatttgttgaacatcgtccgtctgctggttttgccatttctttacaaaatgatgcaaatgctttagagacgatttcaaatgttcaaaaaatattgcaagaacagtctaagtctttcccacaagatttggaatatcacgaagtcgtagataatacgaaattcgtacgtgcctctattaatgaagtagagcatacattctttgaagctttattgctcgtactcatcgtagtgtatgtattcttgcaatcttggcgttctacattgattccgatgattgcagtacctgtatcattactaggaacatttggcgcgtttgtattattagatttctccatcaatacattaacactgtttgccatggtattggctatcggccttgtcgtcgatgatgctatcgtagtggtagaggctgttgaatatgagttaaaatataatggtttatctccaaaagaagctgccattgcggctatgaaaaatgtacaaggcccagtagttggtattgcctttgtattagccgccgtgttcatacctgttgcatttatgggcggtatgaccggtattttatataagcaattcgccttaacaattgccatttctgtggcgatttccgcagttgttgcgttaattttgacaccatcgttgtgtgcattgatgttaaaaccacatgtacaaaatgaacgtgaagactttgttcatcgtcaactcaataaatttaatcgtggtcttgaacgttttagcgattggtatggcaaggtgttagctcgattaagtcatcgtttgagcttaaccgttattacattgctcgtctttgctgctggtacaggtatcgtattccatttcttacctacaagtttcgtacctgcagaagacagtggatatttccttattgctgtaaatgaaccaccaggagcaacgtctgctcgtaccgtggaaactcttgataaaatcaaagatttcttagagcaaacaccgggcattaaagataatgtagaacaagtatttactgtttctgggtttgaccttttaggtggctctcaaaaatctagtgctggtgtttcctttgcggtattaaaagattgggatcaacgtaaatcatctaatcagtctgttaatgctatggtgggtgcagtatttggctttggtgcgaagaatgtacctgaagccagtgtagtagctttgaatcctccatccattccaggccttggtaacactggtggctttacaatgtatatcattaataaagctggtgatagtgctgaggtaatggcggaacgggctcaggcatttatggcagaagctagaactaatccggctattcgaactgtttacaccacatttgatacatcatccccatccttacaatttgaaatcaatcgtgataaggctgctcaagatggtgttcagctcactgatatcttcaccacattgcaaggtttctatggtagtattcaagttaatgattatacatcgtatggtaagaactataaagttgttgttcaagcagaggatcaattccgtcaaaatgctgacaacttgaatatgcttgcagttcgtaatagtaagggacaaatggtttctattgctaactacattacgaaagaaaagacggcaaccccttcatctatcacgcgtttcgataatgctatggccgttaaaattggtggctctgcggctcaaggatatgcttctggtgatgcaattcaagcattgaaggatgcagctgctaaaacattgccagctggttatacctatgattggggcgatcaatcccgcgaagaattgaaggctggatcacaaaccatgttgattctaggtcttggcttgacatttgtattcttgattcttgctgcattgtatgaatcctggaaagttccatttgctgtattattctccgtaccatctggtatgattggtgctgcattagtaccattcttgttgaattttacaggtcgattccaattagcaaatgacatctatatgcaaattggtttgttaacattggtaggtttagctgctaagaatgctattctgattatcgagtatgcgaagattcgtgttgacgaacgcggtatggatgttgtcgatgcggctatcgaagcggctaagattcgtttgcgtccaatcttgatgacgtcctttgcattcatcctaggcgtattgccattggcaatttctactggtgccggttctggtgctcgtacatcaatgggtatcacagtagtagcaggtatgacaacagctacattctttggtatctttatcattccaatgcttttcatcatcatcgaaaagattggtcctggattctttacgaaacgtaaaaagaatcattaaatccaaatttcataacacaaataaaacacgcttataacatagcttataggcgtgtttttttaactattttatggtataatatgctagttaaaacgatttaattatcgcatgggcgatatggtgaaatatttatataaaagaggtataaacatgagtgatgtaaaaacatttgtggctggtcataaaagccctgatactgattctatttgttctgctatttcttatgctaatttgttaacacaaatgggtacacctgcaacgcctgtatgtgctggtgatgcgaataaggaaactaaatacgcgttggaacatttcggtttcgaacacccacaaatcgttacaaactgggaagagttcgctcctaatggtggcgatttatacttaactgaccacaatgaatctaagcaaatcatcgatggttacaaatccatgaatatgtgtggtgttatcgaccatcaccgtattggtgatttcgaaactgacggccctgtattcattcgcatggaaccagtaggttgtacaaatacaattttgactaaactttatattgaaaataatcaagaaattcctaagaatattgccggtttgatgttgtctgctattatttctgatactgtattgttccgctctccaacatgtacagaaacagacaaagaaatggctcgtaaactagctgccatcgctggtgtagatattgaatcctatggtttagaaatgttgaaagctggcgcagatatttctgatttaacaaacgatgaaattgttcgtacagatatgaaggaattctccgaagcaggtcaaacgatttctatcggccaaatttccgttatggatacaactgatgtattggctaaacaagctgaattagtagcagctctagaagctcttcgtacagctaatggctacgcggcatcctatattatggttaccaatattcttgatgaaagcacaacattgatctatagcggtgatgtagtatccgttgtagttaacgcatttggtaaagatgtaaaaaataatgctgtattcttaccaaatacaatgtcccgtaagaaacaaattgtacctccaattttaggagctatgaaataataaaggatatagaccatatcatggtaataaaaacgttgctcttgcaacgtttttattatatgtgatggtcatttataattactcattttatgttatagataaggagataccatgcaatcattgttagatggcttgaatcgggagcaacaacaagccgtacaacataccgaaggcccactattgattttagcaggtgcaggatcagggaaaacaaaggtattaactgtacgtatagcatatttactagctcaaggtgtaaatccttatgaaatcttagccatcacatttaccaataaggcggctaaggaaatgaaaagccgtgtagaaggccttgtaggcgatgtagctaatcgaatttggctaagtacattccacagcttttgtgctaaatttttacgctttgaattagataattttttaggttataacagtaattttacaatttatgatacatctgactctcaagttgttataaaagcagcgttgaaggctctcaatctggacgataaatactatcctgtaggtgctatgatcagtgctatttctgatgcgaaaaataaattgatgtttgcttctgattttagaaaacaagcacgggacttttaccaacaaaaggtagctgatgtttatgaatactatgaaaaagagttacgtaaaaataatgcgttagactttgatgacttattattagtagctgtaaaattactacaatctaatgcagctgtgttagaaaaatacagcaaacgttttaagtatgttatgattgacgaatatcaagatacaaaccacgctcaatacttattggcttatttattatcatcgcattggaaaaatattgccgtcgtaggtgatgcagaccaaagtatttacgcatggcgtggtgcagatattcaaaatatcctcgattttgaaaaggattatccaaattgtacatccattaaattagagcagaattaccgttctacaaagatcatattggatgcggctaatgccgttattgataataatgaaggccgtcctgaaaagaacctttggactgataaaacagaaggggctaaaattcaacattttacagctcaatctgaacatgaagaagcggctttcataggtgatactatcgtaaaaaaacatgatatccacggtgtaccttatggtgatatggccattttatatcgcactaatgcccagtcccgtgtactagaagaagcgttgattaaacgtgccttaccgtacactatggtagggggcacaaagttctacgatagaaaagaaattaaagatgtgctagcttatttgcgcgtattatataatccttttgatgatttgagtctattgcgcattattaatgtaccaaagcgtagtatcggtgctactacggtttctaagttacaagactatgcgcgtgaaaatggtacttccttatttatgaccttaacacaattgcacttagtcgataccattaagggtaaaacgaaagagaaacttgaagaatttggcattttaatttttacacttgttgcagaaatggatgataaatccgtccttgatattttagaggctattcttgatcgaactggctatttggctcaactcgaggaaagcacggacccacaagatcaagcgcgggccgaaaatatcggtgaattattatctgtggcgaaggatttccaagatacgaatccaactggtactgttgaggatttcttagaacaagtggccttagtgaatgatgtcgattcatttgaacaagaagaatccaaggttactttgatgacgttgcatgctgccaaaggtcttgaattccctattgtattccttggtggcttagaagagggcttattcccacatagccgtaccttgatgaatccagaggaaatcgaagaagaacgacgcctcgcatacgtagggattacgcgtgctgagaaggaattatatatttctaatgctacaacccgtaccgtattcggtcgtactagcagttatttaccgtctcgtttcatcgatgaaattccagcggaactcgtcgatagtttacgtgcaaaacgaagaattcctgatgatattaaaccaacggtgccaagacatatgtcggtcgctagtcgccctgtaacaaaaccgattattcgcaatgaagttatcgctgattggaaggttggggatactgcgattcacagcaaatgggggaatggtaaggtcgtcaatgtttccggtgaaggggctggcatgaagttgaccattgaattccctacacaaggtgttcgggtagttatggccaagtttgcaccggtaaaaaaaggttagaacaattactgtatgatatagaggataactatgaatcctaaagatagaatagaacaattacaaaaagaattgactcatgcgcagtatttatattatgtaaaagacgcgccaaccatgagcgactttgaatatgatcaaaaatatcgtgagctcgttgatttagaaacagcgcatcctgaatatattgtgccatcatctccaacacaacgggtgggcatcaaggcggatggtccttttgaaaaagtagtccatggtagacctatgctcagcttatccaatgtatttagtgcggatgaagtacgtgcttttgaccaacgggtaacgaaggaattgggacatcaaacaaaggcttatgtggtggagttgaaaattgacggcttagctgttaatttgcactatgaaaatggtatctttgtccgtgccgtcacacgcggtgatggtaaggtaggggaagatgtaacagccaatgtgcgtaccatcaaatccattcctttatacctagaaaatgcgccagaatttatcgaaattcgcggtgaagcgtacatgccacatagcgaatttaagcgtatcaatgaggaacgcgatgaagaagggttaccgacctttgtcaatcctcgcaatgcagcggcaggttccttgcgtcaacaagaccctgctattacggcaagtcgtaatcttgcgttctttgcttatgccatcggttctgaaagtggtgctaatattcatacgcaagaggaattgttacatacgttggagaatttccatttttccgtaaatcctcattatcgcgtttgtaataccgtagatgaagttattgaggctattaattattggggcgaaaaacgtcatgaactgccatacgatacagatggtatggttataaaggtcaatgattttgatgatcaagagatgttaggctcgacggcaaaggaccctaagtgggctacggcttataaatatcctccagaagaggtggaaacagttgtcaaagatataaccattaatgtaggacgtactggtgtattgacgccaactggagaattagaacctgtgtttgtatccggcactaatgtgagtcgtgttacattacataatcaagatttcatcacagaaaaagatattcgcattggtgaccatgtacttattcacaaggcggctgaaatcattccagaagtcattcgtgtattgcctgaaaaacgtacgggcagtgaggttcctttcacaattcccaatcgttgtcctgtttgtgaaagtccagcagtacgccgcgaaggtgaagcggccattcgctgtactaataaacattgtcctgctattgaaaaggaacaaatcattcactttgcatctcgtgatgcgatgaatatcgatggacttggcccaagtattgtggaaaatttaatcaatgaaaaattgattaccaatgtagttgatttatatcatttgactacagaatccatcatgggtatggaccgtatgggtaaaaaatcggcagataatcttgtgaaagctattgcagattctaaatctcgtggattagaccgcgtactatttggccttggcattcgccttatcggttctaaagcggccggtacaattgctaatgttgtgaagtctatggatagatttttaacgattagtaaacacgaattagtggcggtagaagaaattggaccgaccatggcagatagcattatcgaatatcgagaggaccctcaacatattaaaatcatcaatggcttaatcgaagccggtttaaaaatggacgtagatgtgcaagaaaccaccggtaatgaaatggaaggagaaatcgttgttcttactggtaaactcgaggtcatgggtcgtagcgaagctggtaaactattagaaaaacacggcgctaaggtgaccgggtccgtatctaagaaaacaacacttgttattgctggtgaagatagtggcagtaaattgacaaaggcgaatgaacttggtattcgcgttatcaatgaagaagaatttatagaattacttaaagatttaggtgaaaactaatcctttattttgaaaatatatgtcatatgctttataattaaaagatatgaaaggatgtggaccgatgaaaatcagccaagaggaaattaaaaaaatcgctttactgtcccgattagaagtaaaagaagataaaatggctagcgttgagaaggaattatccgatatcttaacgtatgtagcagaattaaatgaattagaattagatgatgtagaagtaatggctcatgctgttcctttgcataatgtatttagagaagatgagactaaaccttctttagatcatgatttagcattgtctaatgcacctgaagaagatgatgggtactttaaggtgcctcgcgttgtacaagaataggaggtttcactgtggcaacaattcatgaattacacactaaattagtgaacaaagaaatcagtgctgtcgaattaacaaatgcagtgattagtcacaaagcaaaagtggaaccagaggtacatgcgtatttatctgattctcacgaattagcattagcatctgccaaagctgtagatgaagcaattgctaaaggtgaagctatttcccccttagcaggtattcctggcgctattaaggataatatttgtattaaagatcaacctgctacatgtgcatctaaaatgttggaacatttcattcctccatataatgcatccgttattgaacgattacatgctaatcacttggttagcttaggtaaacttaacatggatgaattcgctatgggcggttccacagaaaattccgcattagctaaaacagctaatccatggaatttggaatgcgtaccaggcggttcttccggtggtagtgcagctgcagtatccagtggctctgctatctgggcattgggctccgatacaggtggttctatccgccaaccagcatccttctgtggtgtggtaggtatgaagcctacctatggtaatgtatcacgttatggtttgattgcctttgcatcctccttggatcaaattggacctgttacacgcgatgtaactgatgctgcattggtattaaatgccattgctggccatgaccctaaggattccacatccattcctggcgaacgtgtagattatacaaaagcgcttgtgaacgatgttaagaatttaaaaattggtgtaccaaaagaattctttggcgatggtcttaatgtagaagtacgcaaggctattgatgaagcaattgaaacatataaaaaattaggtgctgaaatcgttgaggtttccttgcctagcacaaaatatgctttgtctgcgtactatattatcgcattggcagaagcaagttccaacttagctcgttatgatggtgtaagctatggtttgcgtgtgcctgcagataatttggtagaaatgtctactaaaactcgtacagaaggctttggaccagaagtacaacgtcgtatcttgctcggtacctatgtattgagcgcaggttattacgatgcgtactatttgaaagctcttaaagtacgtcgcgttatcaaaaatgaatttgatgcagccttctccaaggttgatttgttattggctccaacagcccctaacacagcgtataagtttggtgaaaaaatcaatgacccattagcaatgtacttagaagatatttgtacagttccagctaacttagcaggtattcctggtattagcattccagcgggcatgagtagcgataacttgccaatcggcttacaattattgggtcctgcaatgggcgaagaaacattgttacgtgccgctttcacattcgaacaagcacgtccagattgtcaattagtagcaccaactggggaggtttctctatgagtagtaaatacgaaacagtcgttggtttagaggttcatacagagcttaagactaagtctaaaatcttctgtggttgtaccactgaattcggcggtgatcaaaatacacatgtatgcccagtatgtcttggcttacctggtgctatgcctgtgttgaataaacaagtagtagaatttgccatcaaagtaggtttagcattgaattgtgaaattcttaaattcaacaaatttgaccgtaaaaactactactatccagatttacctaaaaactatcaaacatctcaatacgatttgccaatctgcttgaatggtcacttagacattgaagtaaatggtgaaactaaacgcatcggtattacacgtattcacatggaagaagacgctggtaaattggttcatagcggtaatacgatttccgattctaattcttctaatgtcgactataaccgtacaggcgtacctcttcttgaaatcgtatctgaaccagatattcgatccggtgcagaagcgagagcatacgttgaaaaattgcgttccattttgcaatatttagaagtatctgacggtcgtatggaagaaggttccttgcgtggtgactgtaacgtatccgtacgccttcgtggctccaaagaatttggtacacgtacagaaactaaaaacgttaactccttaacagctattcaaaaggttgttgaatacgaagcattgcgtcaagctaagcttatcgaagcaggcggcaaagtagaccaagaaacacgtacgtgggacgatgcacaaggcatcactcttggcatgcgtaagaaggacgaagaaaacgattaccgttacttcccagaaccagacttggtaccaatcgtaattactgacgaaaaaatcgaagaagtacgtcgttctttgcctgagttgcaagacgctaaaattgcgcgctttgtatccgaatatggcttgtctcgtgaagatgcaaccatccttaccatggctcgtaagacggctgattatttagatgcagctgtgaaagctggcgcagatcctaagactgtagctaactggatgcttggtgacttgtctaagatgatcaatgaaagcggtttaacatttggtgaatctaaggtaagccctgaaaacttggctggtatgattgctcttattgaaaaaggcaccatttctggtaaaattgcgaaaaaagttatcgtatccatgtgggaatccggcaaggatgctgatgctatcgtaaaagaagaaggtcttgttcaaattacagatactggcgctattgaagaaattgtaaaacaagttatcgctaataacccacaaccagtggctgactttaagggcggtaatggcaaagctatcggtttcttggtaggtcaagttatgaaagaatccaaaggccgtgctaaccctggtatggttaaccaattattacaaaaattcttaaacgactaagactgtcttgacttagttcatcttaatattgtataaacgaattgtcctctatggtatatttaccataggggatattttgtttccatgactattatggtataataaattgtataaaattgattaatagttttgtgataaggaatatatcatgaataaccaaaatacaatgaatgaaaataaagaacaagaaactaagacacgtgtcctaagcgatacagagcgtcgcgattttgatggcgttaccattgatgaagaaggggatactgtacaagttgaatttacacctacgcaaaaagaagaagaccgaagtgggtatgagcaatttcaagactatggccctcgtgtgaaggtatatcattttggcggttctagttggataagccgtatcattatgattattgtattagttgcaatcttagcagctatcgtattctttggcggcatcatcttgtctatcgttggcgtggtcatcctagtaggggctattatctcctttatcttaggcttgttttaatggtataatatatctattacgacaagacggtggcaagtccattcgatgatgctaaaggggtactatgaacgtagttctatcaacattaaactcaaaatttatacattcttcactagccttgagatatctcaaggcttatggtgaagcccatggacaggcatacgatatagtggaatatactattaatatgcctgttttgcatattcttagcgatattacagagcatgatatcgatatattaggctttgcttgttatatctggaatatcgaaatgacactacatgtggtggacatggtgaaagccgtacggcccgatattaaaatcgtattgggcggaccagaggtttctttcacagccgatgaattattagaacgatgtccgaatatcgattatattgtacaaggtgagggcgaggaagcattccatgcccttgtaacggcattacaggttggtaatgatggattagaccctgtgattcccggcgtgagaggacgtagggatagtagtattctaggatctttagaggctgtagaggtttctgatttatcgtctataccatttccatatacagaagaagatatggaggatttagagcataagattatttattatgaatcctctcgtggttgtcctttttcctgtcagtactgtttgtcgggtaataagaatactgtacgattctttcctcaagagcggacattagaagaattgcaatggtttattgatcatggtgtgaaacaagtaaaatttgtagaccgcacctttaactgtgcacctcatcatcatagaccacttatggagttcatgagagatagcgatacagatatgaatttccacttagaaatggaaccagagcttatgacggagtgggaaactaacattctttgtgaaacgccgcctggacgtattcaaatcgaggtaggcgtacaaagtacacataagaaaacattagatgctatcaatcgctataatgattggccatacatccaaaaatctatacgtcctatcattcaagcaggacgtacgcatgttcacatggatcttatcgtaggattgcctcatgaggattttaatcgatttggacaatcttttaacgatttatttagcttacaacctcatgcgttgcaaataggattcttaaaattactaaaaggatctggtgtacgacggatgagtgaatataagtatgtagcagatccgttggctccatatgaggttctaagtacgcatgtattaccttatgatgatgtacgtttcttgaaatattttgaagatgtctttgagcgcttttataatagcgaacgatttagaacaacctttggctatattggacaacaattgattcacggtgaaactgatgcatttacttatttctgtgatatgacacgtgcatggcttaaggaaggtaatcataaggttaatcttaaggatatagaccaaattgaattcttatatcgtttcctccttacaaaaggtgatacgatagctgcagagttattgcaatacgatacattggtaagctatcgcggtaaggtgcgcagcgacgcagttggattgcctaaacaaacaaaggaattactacaagtaggcgaagcgttttggcgcaacgaagagattgcgtctatatttattcccaattatacatttaaagaatggcgtaaaattcgtcagcaatatgtggaaatgaatatgagccgtgaaacagcatcatatttaggaattcaacatataccagaaggggatttcacagtgattatagatgtgaataaagaggtgaccccattcattcgccctgaaaacatacaatgatatagaggagtgttatgtcagatacaacgagaccgaaacggtaccggatggtgtcaaaattttataaagaaacatatgctgaaaaggtatataaattacctgttgcattacctttaacctgtcctaatcgagatggatcagctggtgttggaggatgtacattctgtggggaaatcggtgctggttatgaaaatagacctgcatggatgacggtgcgcatgcaattagaagaaaatattgcacacatcggacctaaatataaggctaaaaaatttataccttattatcaaaactttagtaatacctatttacctcttgaggattttaaatcctatatggaacaaggttgtattgatgaagctgtagggattgcaatcgctacgagacctgattgtatttctaatgagtatttagatgtattacaggacatacaacaacgatttcataaggatatctacattgaattaggattgcaaaccgttaattatcatacacttgagaaaatcaatcgaggtcatgatttagcgcaatttatcgatgcggttttacgtattaagcgttatggatttaatgtgaccacacatatgattgttaatttgccttgggatacgatggaggataccattgaaggggccaaaattttatcatcccttggcgttgaccaagtaaagttacatgctctatatattgtgaaacatacattgatggccaaatggtatgaagaaggtcaaatcaccttgattagcgccgaggagtatgcggagcgcgtcgttcagtttttacgccatctccatccagatatcgtgttacaacgattagtgggtcgtgccccagaggataatacattatttaccaattggtctatgggctggtggcgtgtacaggatttaatcgacgatatgatggatgcactagatgcacatcaaggcgatttatgtgattatttaaatggtaaagcagtacgtaaatttatagatgggggacaagcatgagcgaacgggtatttacctttcctacctatgacttagcacaatctatactaggtcaacacaatagatatttacaaatgatgaatgaagtcattcctgcggatattgtatcccgtggtgatacagttgtcataaaaggggacgagcttcaagtagaggcgttgtatcggacattagaggaactggtattcctctataaagaaggcagtacgattacagaatctcaagttcgcattgcggctaagatggtgatgaatggcaaaggggatgcccttcactctatgttcgaggatactttgtccgtaacgatgcgcggtaaaagcattacgccaaagacggaaggtcaaaagcaatatgtagacagtattcgcaagaatactattacctttggcattggacctgccggtacaggtaaaacgttcttagctgttgcattagccgcattttacttgaagaaccgcaatgtagataagattattttgacgcgacctgccgtagaggctggtgaacgactagggttcttacctggcgaattacaagataaggtagatccatatttgcgtccgctttatgatgcgttgcacgaaatgtttggtattgaacaagtacaacgctttatggaacgaggcacaatcgaggtggcaccattagcgtacatgcgtggtcgtacattagaaaatgccttcgtcatcttggatgaagcacagaatacgacggcagagcaaatgaagatgttcttaacccgtttaggtaataactctaaaatggtcgtcaatggtgataaaacacaaattgacttgcctccgcgtgtcacatctggtctctatgaagcagaaaaggtattaaaacgcgtgtctggtattcacatggtgtattttacagatcaagatgtggtgcgtcatgatttggtaggtcgcatcgttaaagcctatgatgcataccatcaaaagctttcaaaggaagaataagaattatgcatatacaaattagttatgatgatggtatagccaaagatactaagattgaagaggttatacaaaaggtttgcgatgaagtgagccgcgtgtatggacttgaagatgatgagttaagcattctactatgcgacaataagaaaattcatgaactaaataaggaatatcgcggtattgatagaccaacagatgtattgtcctttgcccttaatgaaggggacgattacgaaggtagtgaagaggaacatcacctattgggggatatgatactctccttggaacgagctcatgaacaagctgtcgagtacgggcatagttttgaacgggaattagcctatttaacaacacatagttgtttgcatattttaggctatgaccatatgaccgatgaagataaaaaagaaatgcgcacagaagaagaatttgtgctttctaatttagggtatgtacgagaggatcaaccatataatgaataaagcagaacattttaaatccggcttcgtagccgttgtagggcgaccaaatgtaggcaagtctaccatgattaatgctttgataggcgacaagattgccattgtatccgataaggcacagacaacgcgtaaccgcattatttgtgtttacaccgatgaagaaaaacaaatcgttttcatggatacacctggcgtacataagccaaaacataaattaggtgaattcatggtcgatgcagccattgaatctttgaaggaaacagaggctgttctatttgttgtggcaggtaatgaaaaacgaggtccaggagataattttatcattgaacaattaaaacgtgtgaaagtaccggtattcctcgtagtcaataagattgatacactgcaaaaagaacaagtgttagaagccattgtatcctatcaagatgcgtatccatttgctggtgtcattcctatttcggcaaaaaataaagaaaatttatctgaacttcttactgtgctaggtgagcatttgccagaaggtcctcaatacttcccagaagatatgattacggatcaaccagaacgattgattatttccgatatcgttcgcgaaaagattttgttgtctacccgtgatgaaattcctcatgctatcgctgtcgatgtggatgaaatgaagacccgcgatgatggaaccacatatattcgtgctaccatctattgtgaacgcgattctcaaaagggcattatcattggtaataagggtgcgttactacgtaagattggcgcagaagcgcgcatggatattcaaaagttgttggctacaaaagtgtatcttgatttatgggttaaggttaaaaaagattggcgcaataaatcgggtatgctttcagaattgggatataaaaaatagattatttagattgattatagttagaaaggattgttatggacagtatagatgccctgttaccgattgggttcggcatagtatgtattttcttaattaactttttggtggtagcaaaattttcctttgcacggttgcgcaaggaacacgtagaggatatggaaatcctacatgaaaaggatcgtcaattcttgttaaagctataccaaaatcctgagtattttcttaatactacacaatttctaatactctttttcattctcaccttggcgggaactggtacatatatctttaatagctttgtagctggtattatggatattttcaatatccatggaacctgggttcatcatattttggattttctcttgcttattatcattagccttattgtcctcatctttggtgaaattgtaccgaaagcattgggattatcattccctacaaagtatgtcaatatgcatagccgcatcgtcgttggtgttggtcgtattgtatatccttttgtatggttagctagtaaaatatctaactgtatccttaaattttaccaaacaaaatatctaactgaactagaccttgtatatacggaagaggaactacgcatgatgatttctcgaagtcatgaagaaggtcagttgaatcaggtagaatctgagttgatagacaatgttttcaactttgtggaacgtatggcaaaagaggttatggtacctcgccaagatgtggattgtattttcgttgaagatggttatgatgaagccatgaaggtcattcgttctacatcgcatacgagatacccattgtgtgtggaagataaggatcatattgtaggccttgtacacattaaggatttgatggaacgtcaaaagcaggctagaaaagatttgcgcaatatcaaacgagatattttgacagttcctgaggttatgaaattatctaccttattgcaatacatgcgaacacgtcgtatttaccaagccgttgttgtcgatgaatacggcggtatggttggccttgtggggttagaggatatcatcgaagaattggtaggggatattcaagacgaacatgaacctcatttgccggctacgatgagttattctgatggctcctttgagtttgacggcaaggttcttgtcgatgaagtatctgaaatgatgaatattcacattgaagactccgattccgatacgattggtggctatatcttcggtctattaggccgcactccaattgtgggggatactgttgatgcttatggttatacatttgaagtaattaagatgcaaggttatcgtatttcacgtttgcgtgtaacacctttacctgagtctgaaactgttacggacgatgaacatgaacaagattagtggcgctttcaatacgccggccatcgtagtgagtcggaaaaaatataagctctattcggtgttcacctttatcacgccgtccttaggtatcattagggcttcgtttccgcataaacggttgcaaacattgcgtaatgcatcctatttacgtcctttcagcgctatgtatattacagttgtgcaggacggggaatttgtgaaagtcacacaaatcgatggttcctatgtggtggaatccttagatacgaatctagataatattgcgtatgcagccgtagccagtgaactaatacaagaactttttgcattgtattatgttgatcgtaatgtatttaatgttgtggtcaactattcaaaatcgatacgtcaacgaaatgtacgtttaggtaccatcatattgggatggcaaatgctatcgttagccggtgtgatgccacaatatgaagcatttactactggagatggaatcgatttattttgggatgaattgcgcatacatacgcatatgaatccatcccttccattacgtaatgccatgccaaatgtattggcctatcaatggggcgatgcagcacctattgaactttctggaactgtatggaaggaactagaacgattactattttcttattgtgaacaggaaataggtaaacaattacaaagtgtaaaatttctgatgagtttataaaacatactaataaattattaggtatcgattcataagactccttatcaaaaatttttataaattttgaaccacttatctcgaataggttagataaacctatttaagataagtggttttcttatatagaaaaaatataatgtattacctgaatatatatctcatttatgagttagaaaatacaaattaaaagttttatactaaatacattagtgattgttctatataggttagagtgttactagagccctgttagtggaggctctattttatttttttattttaaaactatagattatagaaaatgttaaaggattgtatggaatggaattatttgagtatataaagacattaggtaatgtaggtgtggctctatctggtggtgtagattcatcctatttagcatatgccgttaaacaatcaggtattccatgcaaagcatatactgtaaagtctcagtttgtgccacaatttgaattagacgatgccaagaaaatagcagagtttatcggtattcccttagaaatcattgatatcgatgtactcgaacatgatgatgtaacgagtaacccaagtgatcgatgctattactgtaaacatcatgtattcacaacgataagtgaacaggctaaacgcgatggattttccatattatgcgatggaaccaatgccagtgatgaggtagatgatcgccctggtatgaaagcaatagctgagctatctgttaagtcgccactaagagactgtggcttaacaaaatctatgattcgccagttggccaaacaggctaatttatttacctgggataaaccatcctacgcctgtttagccacgagatttcaagcgggacagcacataacaggtcatgatttagaacatattgaaaaagcggaagagtatttattttcgttaggtttatcagattttagagttcgtctgataggacatactgctaaaattcaagtcccagagaatcaaatagctattgttattaagaataggattgagattctcatattttttaaatctatgtttgatgatgttgtattagatttagaggtgcgttcatgagcgatgatattagatcacttttagaacaagtaaaaaatggacaggtagatgtggatgcagccttattaaagctaaagatgaaacccatagaggatttagggtatgcaaatgtagatttacatcgtcaattacggcaaggtgtaccagaggttatttatggtgctggtaaaactagtgaacaaatcgtgggtattatctcctccatgcagtctaacgggcaaggtcatatattgattacacgattatcatctgatgtggctgcagaggttcaaaagcagcattccttgacatatatcaaggatgctcatatcggctacgttggtgatatgcctacgaagaaaacagagtcaagtatagctattgttaccggcggtacgagtgattataaagtggctgaagaatgtgcaattacagctgaattttatggtaatagggtcaatcgaatttatgacgtaggtgtggcgggtattcatcgtttgttacaacatttagatactattatgtctgctaaggttatcgttgtcattgccggcatggaaggggctttagcaagtgttgttgggggccttgtggatgtacctgttatcgccgtaccaactagtgttggttatggaacggcatttggtggtgttacggcgttattatcgatgctcaattcctgcgctagcggtgttacggttgtcaacatagacaatggatttggtgctgcttatacagcgaatatgattaatcatataggtgaaagtaaatgaaacgattatttttagattgtcaaatgggcattgccggcgacatgctcactgctacattacttgggttagtagataatcctgaaatgtggatagcaaagcttaatcaaatggggataccagatgttacctatacattaataccgaaagaagataagggaataaaaggctatcgggtagcggtaactattaatggtatagaagaatctgaacatcataaaggtagttcccatgaccggcatcatactgagcatcaccatcatgatgctcatcatgagcataacaaacgtagtgaggcacatggacatggagaacattcggagcatcatgtacatagcgaacatcatgtgcatggccgaggtttacagggggtaacggatataatcaatagcttatctatttccgatacgtgtaaacagaatgctatctacatatatcagctagtagctcaagcggaagccaaggttcatcaatcgacagtgacacaaattcatttccacgaactgggtatgctcgatgctattgcagatattgtggccgtttgtgtgctcttagaggaattaaattttgatgagattatcatctcgcctatacatgtaggaacaggaactgttcactgtgctcatggagaactacctgtgccagcaccagcaacgatggagttattagctggtatccctgtgtatgcagattatcaaattaagggggagctatgtacgcctaccggcgcagcgttagccaagtattttggcacagcctttagtcatatgcctgttatgacaccaacaaaggtatcttatggatttggtactaaacaatttgaacgacctaactgcattcgcgcctttgttgaaataaacaatgattcagaagatacaatcattgaaatgtcttgcaatctcgacgatatgacgccagaagaaatcggctatgcagtagaacagctgttactttcacccgccttagatgtatttacaacaccgattatgatgaaaaaacaacgacctggtacgatgctcaccgttctttgtaagatagacgatatcgatagtgtgcgggatttaatattcaagcatactacgagccttggtattcggtaccatcgttgtgaacgatatattttgagccggtctgtaggagacatagactgggaaggcaatagtattgctttcaaaacaagcagtggatttggtgtggagagacataaatatgaatatgattcactagctgccattgctaagcaaaatgatatgagtttgttagaccttaaacgacaattgcgtaagaaggaggattgatttgtcgtagcgggttatttatagtttgttagtgttaagttaaggagtgattcccatgaaaacatttaatgtaccctatgcaaaaggatttgtagatatcaatattcctgatcaaaatattgcaggtgtattagaatctaaagcccattcctataaggcggagctttcacaagaagcattggtagaacatgctttagataatcctatcggtagccaacgcttggaagaattagttaagggtaaatccaatatggtcatcatcacaagtgaccatacgcgtccagtgcctagtaaaattacgatgccaattttacttcgccgtattcgtgaagccaatccttccatcgatattaccattttattagcaactggtttccatcgtcctactacgcatgaagaaatggtagataaattcggtcctgaaatcgtagccaatgaaaaaattgtaaaccatatctctggcgatgcgagtcaaatgactaaaatcggtgtgttgccatccggtggggactgcatcatcaataaactagctgtagaaacggagctattaatttctgaaggtttcattgaaccacatttctttgctggcttctctggcggtagaaaaagcgtattgccaggtattgcttctgaagtgactgtaatggcaaatcactgtgctgaatttattaacagcccatatgctcgtacaggtatcatcgagaataatccaattcataaggatatggtatacgctggacgtactgcgaaattagcatttattttaaatgttgtcatcgatgcggaaaaacatattatcaatgcttttgctggcgatatggaacaagctcatgaaacaggctgtgcttttgtatctgaactagccagtgtgaaagctgtaccagcagacatcgttatcactacaaatggtgggtatccattagaccaaaacgtatatcaagctgtaaaaggtatgaccgctgccgaagcatcttgtaaaaaagatggcgttatcatcatgattgccgcttgtaatgatggtcatggtggggaatcactatacgaaaaccttaaaaatgccaaaacacctcgtgaattactagaccgcattgctaaggtccctcgtaatgaaacaattccagatcaatgggaaatgcaaatcttggctcgtatcctagatcaatttacagttattgttgtaacagaccaatgcgatcctaagatgcttacagacatgcatttgcaacatgctagcacatttgatgaagcattgaacaaagctttagaattaaaaggtaaagatgcaagcattacagttattcctgatggcgtatctgttgtggtgaaagcgtaatacgttatattttaaaagttaatataaacagataaaggtacatcatgattatttggtgtacttttatcttttttattggtatgtcattaatctaatagcattacattgatatgtatacatattatgatttatttattctgatgagagaatatattataataaaatcgtagtggtatttagttatttataggaggttattatggaacttttggggaatctcaaaattcactttctcacactggttcttacagtcgtggctgaattcattggcatccagaaattaggacctattgttttattaccgttattgtacactttgattcttggtctcttaatttctattcctaagtttaagattcttactgttcaacaaatggaaaaatctgctgattatattggcatagcagttatgatcttgatggtaaaagtaggacttggtattggtccaaatttaggaattcttacaagtgcaggttgggctttattattacaggaactaggtcatttcttaggtacgattgttttcggattaccggttgcgttatttgtaaaaatggggcgtgaagctgtaggtgcttgctactctgtagatagagaaccgaatgtagctatcatcatagataaatatggatttagctcaccagaaggtcgtggcgttatggggatgtacatttgtggtgttctcattggtgcaatgtgggcttctgtattatctgggattttagcttcatctggattattccatccattagctttggcaatgggggctggtgttggtagtgcgagtatgatggcagcagctacagcaccaatcgttgcagtatatccggagtatgaacaacaaattatggctttatcgggagcggctaatctattaactactgttcttggtgtttattttggtttatttgtatccttgccaataatggaaaaaacatataatttctttactggtcgtacacgtgaacaagatttagcagaggaggcagtacatcatgagtaagagtgaacaaattacacaatttattattgtcatctgtattgctgcaattattactgctgtaggtaatgtaatggatggaaagcatctttttagtgatagtttaatcggtgttgctattatggctattcttgcgactattggcggcattatttctcatttgccatatgcaaataaattacctatggtattctgggtgtctttggttggtgttattgcatctttacctattatgccaggacaagaatggattatagctaaaacaagtcaagttacatttttagctactacaacacctgtattagcctatgcaggtttatctttaggtaaagacttagcagcatttcgtcgattatcatggagaattattcctgtagcactagctgttacagcaggtacatttatatgtgctagtgctttggcacaaattatgcttcatttagaaggtttaatttaatagtggttttagcatatagttattcatattatagtagtaaataaatatgctttgttaaaaaattatcgaccgtatctaagtacggtcgattttaaaaggagatgttctttttatgacaaaggaagaagtaaaacaacgtgtttgtaaagctattgttgatgcacaaccgcgtttacgagaacttgctgaatctattatggctgaacctgagttaggttttaaagaggtcaaaacctctaaaaaggttcaagatatgtttgataaacttggcatttcttatactactggccatgcactgacaggtgtaaagggtagaatgaaaggccgagatagtaaatatacggttgccatggttggggaattagacgccattctatgtcctcgccatcctcgtgccgatgatttaacaggcgctgctcattgctgtggacataatgtacaaattacgaatatgtttgctgtcgctatgggcttacaagccgtgatggatgaattagcaggcgatgtcgtattatttgctgttcctgcagaagaaatgattgaaattgattaccgcaataaattgcgtgaacaaggaaaactcaagtatatgggcggtaaacaacagcttatctatgaaggtgctttcgacgatattgatatggctatgcaaatgcatgtggagactgccaaaactccagctggtgaaatggggctaggtagtacctctaatggtttcgtatctaaactgattgaatatcacggcaaggtagcccatgcggctcaagcaccgcatgaaggcattaatgctcttaatgctgctttaatgggagttatgggggttaactccattcgcgaaactttcaaagaaagcgattatttcagattccatcccatcattaatcaaggcggtacattggtaaactgtgtacctgactatgttcaagttgaaagttatgtgcgtgcttctaatattgaagctattgtagatggtaatcatcgtgtaaaccgggctttaaaagccggtggcgatgcagtaggggccacatgtgttatcaaggacctaccaggctatttgccgatgcgtaatgatgaacgtatgaatgctctattgcgagaaaattcaaatcctatctttggtgaagccaatgtataccaaggtccacatattacagctagtacagatatgggggacgtatctcacttgatgccagttatccacccatgggttggctgtatcagtggtgtattacatagtgcagaatatgaaatctctgtacctgatgtagcgtacattaaaacagcacaagccttggctatgacaatagtagacttactatacgatgacgcagcaggtgctaaagatgtattagacaactttacgccagcattaaataaacaaagctatattgaaatcttagatcgtatcgctaagggtgaataaaaatagtatatataatcaattatatgcttgatagaaatttaacatgttctcttgacagatattattatttgaaagatgatatagataaatatatatattaattagcgtagtggagaaggaaatgcaactaaaaattaataatattggcaaaataaaatctgctacttttgagtttaatggaatcactgtaatagcaggtaataataatactgggaagagtactgttggcaaagtgttatttgctttattttctaagtttaataatattaataaatctatagaacaatataaaaatgaagcgattattgcaagagtgtttaaagctctttcattatatcaatctgatgaaaaatcaattttatctcttctagatagtccatatgttttagatatgtttaaaagagaaaaacgtaaaacatgttatactccagaagatattgaagagtggttaaatttattctcacaatctgataagttaaaattaacattaaaagatattaaggaaatatttgactcttcatcagaagaaataaatagactagccactaaccgtataaaagcagaaatagttacaaagtattttaatgatatttttgataaccaaattaataatatgactaatattgatcctgctctagtaaatttaaatattaaagataatgatattaaagttgaatttattgagaatgaatgtagttttgttgaggataatataaagcttataaataaagctatatatgttgatgatccttacataatagattctccactagatacatatcaccgtaatttaaaaggtcgtaatgaaataaataattgtcttaataagctgttacattctaaagaaaataatgaaataattgaacagattttagctaaagataaatataaagagatagaagaaaagataaatttagttataaatggtcaactcattccaaataaagatggtaactatactttagaaaataaagaatatccaaatggtataaatgtttcaaatttatcaacaggattaaagtcgtttttaattattaaaaagttaataacagataatttaataatcaatagagatattcttatattagatgagcccgaaattcaccttcatccagaatggcaaatagtttatgcagaattattagtacttttacaaaaatattttgacttgactattctattaactacacatagcccattctttttacgtgcaatagaagttttctctagaaaatattatcttaatgataagtgtaaatattatttggctttagaaaatgagcatttacaagttacgtttgaagaggtgaaggatacatcgttaatttatgataaaatggctaaggccttttttctattaaatgatatcgaagactctttagttgataataatgaggattgagtagaaacggtgaattgttatgagcctatcagatattcaaacttaccttgaacaatttataaatactagaaaaacagtaacagaattatcaaaagacacaaataatcaacgctttgacagccataattggtgtgtttcggatgcacaggcattttgtttagatgacatagtaaaatgttattgtactaactatggttttgaaaatttttcaagtgtagatgctatttctatacatgaaaatgatttaaatttaattgaatttaaaaattcttcttgttgcaaagagaatacaaaaagaagtttaaaaattaaaatttcagatacaattagatttattgaaaagatcgttttaaattctaaatttattgataataattctgtatatattcgttatattttagtatttaatcctataacaaaaaatgaaggattaagaaaaactacagatgaattatttaggttggcaaaaaaagggccatctgataaagaaagattatctaatattagaaattatgtacaagcattgcagctatgtaatgaatttttgattttatatccagatgagtttatcaataatattaataattatttagaatgataatatttatattcttggatttaaatatacttgacaattaatatgagatactgttaacattaccatagttaataactatgcgatgaagcagagtagtaaacctctctagcgagtgaggatggtgtaagctcacatttggttgaaggcgctgtagagcattggcaggaacgcaggtatctgttagtaaaggccaacatagaaaaaagagggcgcaagccaaatagggtggaaccgcgggtatactcgtccctgtaacgtttttcgttacagggacttttttgtttgtaacgaaatggttgattttatgtcggttgtgtaaagtggaggcagcaatgacatttcaagagattatactaaatctacaaaagttttggagtgaacaaggttgtatcgttcaaaatccatatgacatcgaaaagggcgcaggtacaatgaaccctgctacattcttgcatgctattggtcctgaaccatgggccgtatgttatgtagaaccttctcgtcgtccagcagatggtcgttatggtgataaccctaaccgtttgttccaacatcatcaattccaagttatcgtgaaaccatctccagataacatccaagaattgtacttacaatccttggcaacacttggcattcacgctgaagatcatgatatccgtttcgtagaggataactgggaatctccaacattgggcgcttggggccttggttgggaagtatggctcgatggcatggaagtaactcagttcacatatttccaacaagttggttccatcgactgtaaaccagtttccgtagaaattacatacggtttagaacgtttggctatgtacattcagggcgtagaaaacgtatatgatcttaaatggaatgaaaacgttacatacggtgatgtttggcatgccaacgaagttgaacaatctgtttacaattttgaactagctgatacagatatgcttttcaaattgtttgatatgtacgaagcagaagcaaaacgcgtttgcggcgcaggttatgtactaccagcctatgactatgtattgaaatgttcccacacattcaacttgcttgattcccgtggtgctatttctattagtgaacgtactgctttcatcggccgcgtacgtgcattagctcgtatttgtgcacaacaatacctcgctaaacgcgaagaattaggattcccacttttgaaaggagataaataagatggcaaaggatttattatttgaaatcggtgcagaagaaattcctgccggctttatgccaaatatcttaggtcaattgaaaacattggctgaaacaaaattaaatgatgcccatcttccttttgaaagcatcgctacatacggcacaccacgtcgtttggctcttatcgtgaaaggtctcggtgacacatctgctgaaatcagcgaacgtcataaaggtccttccgcgtctatcgcatatgatgctgatggcaatcctacaaaagcagctattggttttgctcgtggtaaagttcttgatgtagcagatcttgttgtagaagacggctatatctatgctgaaactaaaactgctggtgtacctgcaaaagatattgtaactgatatgttgccacaattgattacaggtcttaacttccctaaatccatgcattggggcaatttagatgctaaattcgtacgtcctgtacgttggcttgtagcgttacttgatgaagaagtaattccagtagaatttgctactgtaaaatccggtaatgtaacacgtggtcatcgcttcttaggtgctgatgaaatcactatcaaaaatgcagcttcctatgtagatacattaaaagaaaattttgttatggttgatcaagatgcgcgtcgtgaattgatctccaaacaattacatgacattgcagcttctaaaaatgcatccatcgtttgggatgatgatttgttagaagaaatcaactaccttgttgaatggcctacagcattgtgcggtggcttcgaagagtcttacttggcacttccagatgctgctatcattacaccaatgaaagaccatcaacgttacttcccattagttgaccaagacggcaaattattgccaatgttcttaaccgttcgtaacggttctgaccattccatcgaagtagttcaagctggtaatgaacgcgtattgcgcgcacgtcttgatgatgctaaattcttctttaacgaagaccgtaagaaacctcttatcgaccgtcaagatggtttaacaaaaatcgtgttccaagaaggtcttggcaacttagctgacaaaacagaacgtttgttaacattaggccgtgtgttcagtgaagaatgtgaattgcatgaagatgcacgtgtcgtattggaacgtgctactgaacttgccaaaacagaccttacaacaggtatggttacagaatttactgaattacaaggtgtaatgggtaaagaatatgcgttacttgacggtgaatctccagaagtagcggaagctatttttgaacaatatttgcctcgttttgcaggcgacgtattgcctcaaacagaagctggtaaagtgctgtccattatcgacaaaatcgataacatcgttgcaacatttagccgtggtttgattcctacaggctctcaagatccatacgcattgcgccgtcaaacaatcggtatcttgaacatcttgcttaacagcgaatggaatatttccttgcgtccaatcatcgtggaatctatgaatcttctcaatgtacctacagataaacaagatgaattgcttggccaagtagaagaattcattacattgcgtttgaaaaatattttccttgaccgtgaagtacctcatcatgtaatcgacttgttgttatctaacaatgaattatccgttgccgatgctgaaggtcttgtgaaagctctcttggctaatcgcattgatgaaaatgttgaattagtacaagctttcacacgtatgtataatcttgtgaaagatgtaacatataccggtgttgatgaaagcctattgaaagaagatgcagaacgtgccttgtatgaaatggctacaaaagcatctgaagcaagtatcgatgcatgggataaaaatgactatgacgctgttgtggcagtacctgctacattggtgcctgctatcaacaaattctttgaagatgttatggttatggacaaagatgaagctattaaagctaaccgtttacaactggttcgtttggcatatagcgtaatggctattatcggcgatattagtgcattaaaataacatatattttatatagttaggaaattacatttgtcttaactatgtgaaactgaggaaaggcaactgtggttgccttttctttatgcaggaattttggcatctatgtcgaatacataaagtatacaaagttgtaaggagatgtcattatgattacaaatgttgaattattcaatgccctccgtaatgtgacggctaagcgtgaaggttcacgttatagaatacttatggaattatatacaataggtaagggaacgagccaacgtgtattagtggatagtttacagattcgcccagctaccgtatcggagcaactggatgtactcatacaattggggtttgtagaaaagaccatcgatacgatggataagcggacaactgttgtgacactaaccgatgcagggaaagaagaagcacatagtttagttgaacatagggaacagcagttaactcatcggtttagacgattatcgccagaggatcgacaagatttgtatgacctattaggccgtattgattaagctatatacttgtatatagttgtggtgaaatgggtatataaatctatacaagatatagtgtgcaacctcttgcattgtacattgacttgtgataatatattactgttaatttgagacagtccgctgcctataaggtgtaggtattgaatgtctgcaaacaggaggaaacaatgaacattattaacgtactcgaacaagaacaacttcgtacagacatccctactttccgtgctggtgatacagtacgcgtacacgtaaaagtagtggaaggtagccgtgaacgtatccaagtattcgaaggcttggtaattaaacgtcaaaacggtggcgtacgtgaaactttcacagttcgtcgtattgcatccggtgtaggtgtagaacgtacattcccacttcacagcccacgcttagctaaaatcgaagttatgcgccgtggtgttgttcgtcgtgctaaattgtactacttacgtaaccttactggtaaagctgctcgtattcgcgaaaaacgctaatgttcttaaaaggctgccgttggcagccttttatttttgctaaaatatagatataaatacattcatacaatatatatagaaaggagacattatggcagattcacctatcgtacattggttccctgggcatatggcgaaagctacgcgcatgataacggagtacatcaaaaaggttgatgttgttatcgagttattagatgcgcgtattcctcgttctagtgcgaacccagttatcctagagttagttggtcaaaaaccgcatattgtactgttaaataaggtagatttagcagatccaaaagcaacgaaggaatggacagaattctttacgcaacaaggcattactgtattagccatcgattccaagtctggtaagggtaataagaaattagtatctactgtagaacgtctcagtaaacctatcattgatcgttgggtagcaaaggggattcgtagtcgttctatacgtaccattatcttaggcattcctaatgtaggaaaatctacattgattaattccttggctggttctgcagcaacccgtacggctaacaaggcaggtcacacgcgtggtcagcaatgggttaaaatcggtaagaatatggaattgctcgatacgccaggcgtattatggcctaaattagaggaccaacgagctgctgcgcgtcttgctatgacaggtgccatttctgatgatgtatatgacttagagcacgtaattaagcaattgttaaaccatttattgacgaatacacctaatatcttgattgaacgctacaaattaaaagaagaagagatggccgatgtggatacaattcttgaaagcattggccgccgtcgaggctgtcttgtaagcggtggtgttgttgaccttgataaggcgcgtcgcattattttgcaagactatcgcaatacaaagcttggtacaattacactagaccaagttaatgaagaaccgtattatccagaagatggtgaggaaatgcataatggataaggatatcttcgctaagttaaaggtagctgatattaaggccctttttgaaacggaacaagctttggaaattttaccattagcacaagaagatactcgtagttccgttcaaaaattagcagtctcttatattaaacgtcaagaaaaagagctaaaagaacaacaacgtttgatgggcatgtacgactatgaaggcatgttctatgatgaagggctatatcatgtggctggcgtcgatgaggtagggcgtggtcccattgcaggtcctgttacggtggctgccgttattttaccgcctatgacattaattccaggccttaatgattctaaaaagctaactgaagagaaacgtgaagcattgtatgacatcatcatggaggaagctgtagcggtcagctgtatctcctatggtccagaaaaaattgatgagctcaatatttatgaggctacacgtcaagcgatgtatgaggctattcgcacccttgatgtacctgcagaggctgtcgtagctgatgctatgaaattacctgatttaacgatacctgttgaatctatcatcaagggcgatagtaaaagtgcaaatattgcagcggcatccatcattgcgaaagttacacgggatcgatatatgaaaagccttgatgaagaatatcctggttatggttttggcatacataagggatattatacagaactccacaaagaagctgttgagcagcaaggtgtgacaccattgcatagaaagagttttgaaccgattaagtcaattgttggatggcatcgagaagaaaaataaatatatagattactctattgtgaaataaaaatgaaaaatctatagagaagaggttcctattggtcacctaggtgactattaggaacctcttttctatttacattcatggtcagaccgtcatatgttgtatatataagtattcgaaagcatctatatacataaggaggtaatcatgaatacgatgaattgtgaacaaaattgtaacctattagatgcaaaagctcttggtaattggggagaagatattgctcgacagtatattgagcaacaaggattgaaaattgtaacgaccaattacaaaacaaaggtagctgaaatcgatattatcgccaaaaatgggctgacctatcattttattgaaatcaaggcgcgtcgtggtgtcacccatggattgccacgggaggcagtttcaaaacgtaaacaaaagcatattaagcaggcagctatgtattttatacgagatttgcgggcccagaatcgaaaatggaaggaactatcctttgatgtagttgaggtgtatgtacatgaggattttaaggctactgtacactatatgcctcagtgtttcctgtaggaggtccattatgtatgcaaaggtctatggtgctaccatagatggtttagatggcgtcgttgtaacagtagaggtggacatatctcaagggctacctgtctttgacattgtgggactcccaaatcaagctgtaaaagaatcgagagaacgcgtacgggcagccattaaaaatagtggatttgattttcctatgcgtcgtattgttgttaatctagggcctgcagaggtcagaaaaagtagttccggattagatttgcccatagccataggtgtattagccgcatcaggtcaaattaggctacgcaaacctaaattaacaaaattattacaatcaactctgtttataggcgaattatccttagatggcagtctaaaaaagacacaaggcattcttagtatggctatgaaagcatttgatgacaagattcttacgatctttacaagttcggataatgtatcattgctgcacaatatagaagcaattacatcctatggtgcacatacattggcggatattgtgaaacttgtaatacgaccggatgaatatcgtgtagacactgttgatgacgattgtaatgacgcggtcaacagcctcattgattacaaggatgtacaaggccaagaactaggaaaacgagccatggttattgctgctgcaggtgttcaccacgtgatgatgataggtccgcctggatctggtaaaactatgttggcagaacgattaccaaccattttaccacccctaagttgggaggagcggctagaaacaacacgcattcatgatgtggcagggttgctcgaaaagaataggctgattgctaaacggccttttagatgtcctcaccatacagcaaccttggcgagcatcatagggggcggtagtaatgcaaaaccgggagaaattacattagcccataaaggggtgctatttattgatgaagcaccagaatttccgcgctatgtattagatgcgttacggcaaccattagaatctcatatgattactgtgaatcggttacaaaatagttatgactatccagcagattttatatgtatactcgccgcaaatccatgtccttgtggatattatggggaccctcataaggagtgtgtttgtagctctacagaattagaaagatatcagcataaaatatctggacctatattggaccgcatagatctattcatccttgtagagagacctagttttaacgatatgttatgtatggattctgattctatgagcagtgcagatatgaaacaactcgtggagcaagggcgccagatgcaattagaacgtttccaagaccaaccctttaagtcgaatggtgccttgccacatggcgctattcgtgaactttgtaatatacgcgatgattgctggggcttgttaggagacgtatatgaacgatttcattttacagggcgtagctttgatcgattgctgaaggtgagtcgaaccattgcagatttagatgggtccttatatatagaaaacgaacatatttcagaagctatgatgtatcggcacattccatatcatgtgtcgaggataggagttcatgatggagcaacagtatgaaagtaatttttatattgccgccatgcagagtatttcttcactaggagcggcaacgatacgtgatttagtcgaaaagtttggagatccttataaggcatggtgtgctttacaaaatcgtaagaacctaacgacaatactaggcattccgtccacaaaatataggcaaatcgagaaagaggcgaccgacgaacgattacggactatctataaggctcttaagaactggcatatagaatatattacgtaccttgacgtattattccctgggcatttgcaagagatatacaatccgccagccgtcatatttgtgagaggaaatatatcgttgttagatgatgaaactatgaaaattgccatggtaggagctcgaaaatgttctgattatggtcgtaatgtggcactgcggataggtaaggaactagctgcgtataatgtagccatagtcagtggtggtgcgagggggatagatagtcatagccatgaaggtgctttatcggcaaatggacaagtgatcgttgttatgggatgcggtttagatattgtatatccaccggagaataaacgattatttgatgccgttcttaagaacaatggtttattagtatcagaatatcctcccggtacaccgccgtcaggtgtccattttcccgcaaggaatcgcattattagtgggctttcacaaatcattatcgtagtagaggccaaggcgagcagtgggtctctgataacggctgatatggccgccaatgaaggacgtgaaatctatgtggtgcctggcagtattttaagcaatgtagcggagggcaatcactggctcatgcgccaaggggctaatatattaacgaaagcacaagatataatcgaggattatgagttaaagccccgtgtagttgatacgcaagggtccgatgtgttaagctttaaggtggaatgggaggtcgtgttgagtacaattcctaccgatcaatgtattagtgtaggcgatttaatcaagaaaacacatattccattacaacgattacaaagtattttattagaccttgaaatgaaacatatgattgagaaggttcattctaagggctatattaacataatcgggagtgatgcacttgtccattaaacgatcaatcgttattggggaaccgaaagaaccaaaacaagaaacaaaaaagaaaaagactacgattaataaaaaggtagcaaaagaagcattgacaccagttggtattgtacgcgacaaatcgattgttgcttcatcgatgccaccagagcaacgaaaacctcgcgtatataatccggatggtaaaatccttgtcattgtggaatcaccggctaaatctaagactatcgagaaatttttaggccctaattatattgtgaaagccagtatgggccatcttcgggatttgcctaaatctcaaatgggtatcgacattgatcatgactttaccccacgatatagtaatctggtagcacgtaaaaaggtgattgacgatttggtggcccatgccgatgaaagtagcgccgtattgctcgcaactgacccggaccgcgaaggggaagctatttcctggcatttagcgtacattctaaacgtagatatcacatctaattgtcgtattacttttaatgaaattacgaaaactgctgttgcagaggccttagagcatccacgtactgtggatatgaacatggttgacgcacagcaagcacgtcgtgtactagaccgtattgtagggtataaattaagccctctattatggaaaaaggtttgcaaaggtttgagcgctggtcgtgttcaatccgtagctgtacgtctcatttgtgaacgagaacgtgaaatacaagcttttgtacctcaagaatattggtctattgaaggacaatttaagacaaaaactaatgaagagttttccgctgaactaactcatgtaaagggtgataaactagatattacatgtgaagcagatgcagtagcaatacaaaaggctattgcggaccatacggctactgttacatctgttaagaaaagtaaacgaagccgtaaaccagctccgcctttcaccacatctacattgcaacaagatggtgttcgtaagcttaattttggggctaaacggaccatgatgattgctcaacatttatatgaaggtttggaaatcggttcttatggtcacgtaggtttaattacctatatgcgtacagactctacacgtatatccaaagatatgcaagaacaggcaagagtctatattaagagaacctatggcgatgactattgccctgctaaaccgaatgtatatggtaagaaggaatcagctcaagatgcgcatgaagccattcgtcctacatctcttgaattgacacctaaaatggtagaaccatttgtaaatcgcgatgaactaaagttatatacactgatttggaatcgttttatggctagccaaatggcaccacaacaaaatgagtccactaccattgaactagatattgatgatacttatacctttaaggcaactggttcccgtgtgttattccctggatttagtgcagtctatgaagatagtaagaaagaagatacgccacaattaccagcgttgaagaaatctgatgtggtggaaactgtacttatcgacccagaacaacattttacgcaaccgcctgctagatattctgaagcaagccttatcaaaacattggaagaattaggcattggtcgcccaagtacatatgcgccaattatagatactatcgttagccgtaactatgtagaaacaaataataaacaattcatacctacagaactcggctttgtagtagtagactttttagtggcctattttgaaaaaatcatcaacactgggtttactgcagaacttgaagaggagctcgatgccatcgctaatggtaaggatacgtatgtgaaggtattgactgatttttacaatatatttaagcaagaattggatgatgctagcgatgtagacaaaattcaaatcgcatccatggaaagtgatgaaacctgtgagctttgtggtcatcctatggtctataaattcggtcgctatggtaaattcttagcatgttctaacttcccagaatgcaagaacactaaaccgattacggttggtaccggtgttgcttgtcctaaatgcggtgaaggagaaatcgtagaacggaaatctaagcgtggtcgtatcttctatggttgtaatcgttatccacaatgcgattttacgttatgggataagcctactcatgagttctgcgatacatgtggcagcattatcgttgaaaaatcatataaaaatggtacgacgaagaaattctgctccaatgaaacatgtccaactagaccacctaagaaaacgagaaagaaaaagtctgatgattcagtaaagaaagaagaggatacaaagagtgagtgaaaatagagttactgttataggggctggcttagctggttctgaagcagcgtggcaacttgccaatcgtggcgttgctgtcgatttatatgaaatgcgtcctgtaaagagttctccggctcatcaaacggatcaatttgctgaactagtttgtagcaattctttgcgcgctggtaatatagagaatgctgttggtctactaaaggaagaaatgcgtcgattaggctcgttaattatggaatgtgcagatgcaacggctgtacctgctggtggtgccttagcggttgaccgtcatctattcagtgctatggtaactgataagataaaaagtcaccctaatattacagtgcatcatgaagaggtgacatctatccctatagaaggaaccgttatctttgcttctggtccattaacatctgaaacactaggtgatgccattagagaattaaccggtaatacgggtttttatttctatgatgcagcggcccctattgtgaccgcagagtctcttaactatgataaggtgtttgctgcgtctcgctacgataaaggcgatgcggactatcttaattgccctatgaatgaagaagagtataaacacttctggcacgaattgacccatgctgaggccgtacagcctaaggattttgaaaaggaaatctattttgaaggttgtatgcctgtggaaatcatggcatctcgtggagaggatacattgcgttatggtccattgaaaccagtaggtttagtggataagcgtaccaatgaagaatcctatgcggtagtgcaattgcgtaaggaaaataaagagggcactatgtttaacctcgtagggtttcaaactcatttaaaatggggcgaacaaaaacgcgtgtttggtttaattcctggtcttgaaaatgcagaatttattcggtatggtgtgatgcatcgtaatacgtatatcaattctccagaattgctcaatcatgcattccaattacagtctgatcatcgactattctttgctggtcaaatgacaggtgtagaagggtatcttgaatcagccgcatcaggactcatggtagggttacaggtaaaacgataccttgatgataatgcatttatcaacttccctaaaacgacggctatcggatcattgagccaccatatatcttcctatgaaggatctaatttccaacctatgaatgtcaattttggtattatggaatcatggcctcaacggattcgtaagaagaaagagaaaaatgctctcattgccaatcgtgcattagaagaacttgacgcattaaaggcacaagaacaactgtagatgatgcttgtcgctcatagtctatcgttagaataattgaatagatataaaaaatccttcattcatggatgttgtgtatccgtgaatgaaggattttgttatttacgtttcttttgtttttgtggtgcttctggtactgtttcagccacatcttgttgctttttatctagataaccaaagtagataaataaacagatacctacaatcataacaatgaggctcgtcatctgtgctgatttaagtcccattgtgaggtttacataatcaccgcgtaagaattctaagcagaatcgcgctgcggaatacaagatagcgtatagaacgaacacttgtcctttagcatgtttgaatgagctaaagagtagtaagatcacgaagattagaatatcgatttggccttcccaaatttcagctggccataatggctgattaccataggtgcggtatgcaagggtgctttcaggatagagaataccaaaatttccacctgtaggatgaccaaaggcatcgccgttaaacaggttagccatacgcccaaccgattgagctaaaatgagggctggcgcaaaaatatcggcaaaggcccagaaatcgatattatgttttcttagataccaataaccggctaatgtaccgagtacaacgcctccttgaatggccatgccgccttgccatacgaaaggaatttcgaggagatgattgccatagtaatgccaatcgaagaaaaatacatcccataagcgggcgccgataagacctgctatagcgactgtaatggagaaatcaacaatgtgctcgtgccacccacgaccgtcttttttgagtaagaaataggctacagaggcaccgctaatgatggctagtgctaacatgacaccgtaggccctgattggaaaatcgcctatgaaaaatagatattgatgcatatgaactcctttatgaataaacgttcatgcttttataagcatagaaattataagtgtcgatatatgtatgatataatataggaattgttatgtaaacaaaagctagtcagcataaattataggagacatacatgttacgtaaatttgctatggtcactaccttggcagctgctgtattatctagtatttctggtaatactgtacaggctgaagtattggtgccattacaacaatatttaaatacgaccaaccgtaattatgaggccaatcaatataagacatcttatacaatctatgtaccacagctagaattgaatggtacaaccattacgatgaatcctaaagccgttggagagccggttaaattaccgattaccaaacgggatggtgccgagtatgttgatgtagaaaatacaacaccgttgataggcgtcacctatacaaaggatggtgatcacgttcaattgaccgctgcgccagagacgatgcaagtattgcaaaataaacctgtccaaggacctctatcttgggcctttgacccatggcctaaccaagatactccgtatgcgaaaaaattgaatgtcagcggagataacatcatttctccaagttggttcaaattacatagccttggcttagaatctagccctaatattaatgtggactatgtgaaagcatacaaggccaacggatatcatgtgtggccgcttattacaaatcgttttgatccagattttacgagtggtatcttagccgatgaagccgtgtggaaaaaatacgctcaaaatctcattcaatacgcttatatttatggatttgatggatataattttgactttgaaaatgtagactattctgaccgtgataaattgacaagattcgtagcatacttagctgacgaattacataagtataatattcaatcttctgtagatgtaacgggatattctaatagtcccaattggtctcttgtatatgaccgtaagtccttcgctaacagtgtagattatgtcgtattaatggcttatgacgaaacatgggccaagagtactacggcaggaccggttgcaagttatccttgggtacgcgatcatgctgagaagatgttgcaagaggtaccaagtcataagcttgttcttggcattccattctacactagaatttggcatgaatcaggcggtgtggcacggggtgaaacattggccattaaaaatgaatcatcttatttcacaaatcacgcatcgaatattatttggaatgatacgttaaaatcttattatgcagctattccaacaactagtggtaccgataagatttggtttgaagataataaatccttaggatataaattaaacctagtgaaagaattagaattggccggctttgctgcatggcgtaaaggctttgaagatgatactacgattacaatgattcaaggcgttgatttaggtaaaggtacacctaacacagcaccagttgttgaagctcctaagcctgttgttgaaaaaccattaacaaaggctgaacgtaaggctcttgaaaaagcagctaaagaaaaggcgaaagcagaagctaaagcagctaaggagaaggcaaaagcagaagctaaagctgcaaaagaaaaggcgaaagccgaagctaaagcatctaaagaacgtgcaaaagcgaatgctaagactgtgaatgaaaagcaaaaggttgataatgatatagcatctatcgttcccgctgttcaagtagtaaaaaagtagataaattgacggtttatggtacgaagtagtacaataatactattaattagaatcacaaacagatttgaggaggcacctacatgaacgaaaaatatgtagcccaagatattgagaaaaagtggcaaaagtactgggatgagaaccatacttttaaaactgaatatgacgaaagtaaagagaaatactatgcattagaaatgttcccatatccatctggcaatttgcatatgggccatgtgcgcaactattccatcggcgacgtagtagcgcgttttaagaaaatgaatggctttaacgtattgcatccaatgggctgggattcctttggtatgcctgcagaaaatgcagctattaaacatggtattgcacctaaaacatggactcttgataatattgagaacatgaaaaaacaacaaaaagcattgggcctttcctatgattgggaccgtgaagttgccacatgtaaagaagattactataaatggacacaatggttcttcgaacaattctataaaaaaggtttagcttataaaaaagaagcaaaggttaactggtgtgaaacatgccacactgtattagctaacgaacaagttattgatggtctttgctggcgttgtgataatcctgtagagaaaaaagatttatctcaatggttcctccgtatcactgaatatgcagatcgcttgttagatgatctcgatacactcgatggttggcctcaacgcgttaaattgatgcaaaagaattggatcggtcgctctgaaggtacagaattctcttttgatgtgccatccattaatgaacgtatttccgtatatacgactcgtgtagatacaatctacggcgtaagttacgttgtattggctcctgaacatccatatgtagaacgtttaattgaaaatgcacctaacaaaactgatttagatgcttttatcacgcgtatgcgcaacatgagcgacatcgatcgcacgtctacagaagcacctaaggaaggtatgtttaccggttcctatgcggtaaatcctatgtctggtgaacaagtgcctatttggattgctaactatgttctcgtagattatggtactggtgccgttatgggttctcctgctcatgacgaacgggactgggaatttgctcataaatacgatttgcctattaaacctgttgtgtctcacaatggtgaaaactacaatttcgatacatgggaagaatctgatcacgaagatggcgtgttgattaattctggtgaatttgatggtcaaacatctgaagaggctcgtaaaaatattacggctgcacttcatgaacgcggtatcggtgaaggtaaaactaatttccgtcttcgcgattggcttatctctcgccaacgttattggggcgtgccaattcctgttgtatattgcgatacatgtggtgaacaactcgtaccagaagacgaattgcctgtacgtcttcctgaagatgttaaatttgaatccggtgctgtatccccattggcaacatccgaagcttttatgaacgctaaatgtcctaaatgtggtggccctgcgcgtcgtgaaacagatactatggatacattcatcgattcatcttggtacttcttgcgttacactgacgcattgaacgataaagcaccattcgattctaaaattgctaattattggatgaacgttgaccaatacatcggtggtattgaacatgctatcttgcacttgttatactctcgtttctttgtgaaagttattcatgatttaggacttatcgaagctaacgaaccattccgcggccttttgactcaaggtatggtacttaaagaaggcagcaagatgtctaaatctaaaggcaatgtggtttctccagaagaaatcatcaataagtacggtgctgatacagcgcgcttattcatcttgtttgcagcaccagttgaccgcgatcttgattggagtgaccaaggtgttgaaggttcctatcgtttcttaggtcgcgtatggcgtattgttgatgcgtatgcccaagcagcaaaagacaatcatacgggtgaccttacaaaagacgaagtggcattacgccgcgaattacaccgtgttatcaaaaaggttacagaagacttagataataacttcaactttaatacggcaattagtgcgattatggaacttgttaatgccatgtatgcacacaaggacaaagcagaatccgtaaatgctgatcttgctaatgagttaacacataatctcgtgttgttattagctccgttcgtaccacatattacagaagaattgtggcatgaacttggcgaaactgaatccgttcatactatgaactggccaacatacgaagaatctgctcttaaagtagacgaagtagaagtggttcttcaagttaatggtaaggttcgcgataaattaactgtttctgtaaatattacgaaagaagaattggaagcattggctaaagaatccagccgtgttcaagaatttacagaaggtaaacaaatcgttaaggttatctacgtaccaggtaaacttgtgaatatcgttgtaaaataatatttctatatatgatttgttaatataatgaaagcccccaactacataagtagaagggggctttattatctagagaggttattatggcaaaacgtagcgattatatttcttgggatgaatactttatgggcgttgctattttggctgcgcaacgatccaaagatcctaatacacaagtgggggcctgtatcgtcagcaatgataataagatcttatccattggttataatggcatgcccttaaattgtagtgatgatgattttacgtgggaacgggatacggcagatgataataaatatttttataccgttcatagtgaattaaatgcgattctaaactatcgcggtggttctttagaagggtctaagatttatgtaacactattcccttgtaatgaatgtgcgaaagctatcatccaaagcggcataaaggccgttatttatcgagatgatttgtacaaagatactaaagaggttaaggcttcaaaacgtatgctaaagacggctggtgtagatattattgaatatcaatcgacgggccgcgtattggaaataacactataatagataaaagagggatggtgtatccttcgaaggcgactttggccctgcggaggccgaaggccggagtcagacccggccggtggagcttacggaggatgtaccatcccttttatatgttgtgtgttataccaataagcggccgtcgatcatgatatctacttgttggccgtcttttgtaatgcctttaatattcatgttttcgtgaccaatcataaagtccacatgagcgagggagtggttgagaccacgttctttgagttcatcttccgataaaccatcgctattttttagacaagttggataagctgcaccgattgctaaatggcaggatgcattttcatcaaacaatgtttcatagtaaatcatgttagattgactaatagggctatagtgatccacgagggctacttcaccaagatattgagatccttcgtctgtttcgatgagttctttaagaatatctaatccttcttcagccgtgtaatcaacaattttaccgttttcaaaggtaaaggagaagttagaaataggattgccttggtagataagtggttttgtactgactactttaccatttacaccattccattgaggggcacagaacacctcttctgtaggtatattagcattgaatttgataccctctttggagaactcttcgccaccttgccaaatatggtcttctggcaattcgagaagtaaatctgtgccattttcacatgtatatcgtaatgctttcaaatcaagagcgtttaatgcttcgcgacgatggcgtagcttagccatgtgatgcgcatatgtttcttttgcctctacatcattgagacgacataattttagtaatgtaagccagagttgatcaattttttcttcatctgatccttcatagccaagaagttcagcccaaagcactgttggtacagcggctacacaccatgttacggatgagttcatgatggctgtatggtagaaggataggaccttattgagattgcgtgagtttaggctaatgcgctctgtaggaattcctgctaacgcctttggattggcactgataagtgataaaaaggcagctttttcctctacatactgctcgtagtatacaggaatccatttagccggtgtttctagaaccgacgcatcagcatgtaataagcgttgtcgtgtgattggggtatggcgccaattgatgatgacctctttggcacccaattgataggcttcttccgtaacgatgagtgcaaaatctttattgtctacatcaacagatacgatgagtatttgcttttcttgtaaattaacgccagactgcaataaagtacgggcgtatttacgtaataattcttgattcattataaactccttaagatagtaataggatataccggtaaagtatgtttctttaattcgatataattttgaaaactcctgcttatgtgactaatagagtcacaagtaggagttatttgttgtatatggaaactctaatagtaggaggtgaccatatgaaacaaatgattgtgtcacataagtggattataataatcctgtgtattttagtaggaatttatttcctatggcctattataacagaaggaagcaccacaatgccagattcgtctgtattagcggctaatacgtctgacgtgaatagcattaatcatcatgaaagtaattctattcatgctaataatggggtagttcaacctgaacaacacactgaaagtacagatgctattgtgtatgtgacgggtgctattcaatcgccaggtctttataaggtggcagctagctcgacaattggcgatgttataaaaggggctggaggtgcactaccatatggagatgtagagtccatcaatttagcagagacagtgacaggtgggcagcatattcatatcaaatttaactttcacgggaatcctgaatcattactacgaaatcaaaagattaatattaacacggctaccgttaaggaactcgattcactgcctggaattgggccaaccatggcaaaacggattgaagagtatcgtcaaagtaagggcgcttttacatctatagaggatatcaagcacgtcaaaggtatcggcgatggattatttaagaagatacgcgataaaattacagtctaatttacctatttatttgacactgaatatgctgatcacctattcggagatagcccattatattctaagtggtatcatactaggcattttatgtgcctatagctcgcattatgtattgcttgatacgagttggtattgtatgtttggtgctgctggctatctactatatacattggttaaagctgtggttcgctatagattacaatcgtctttgtcaattaaatatatagttgtaacctgcattgtctcatgtgcattaggtggcatatcatttttacatgtaaaccatcaaattaatcagtatgtagggcacactaaattctttttatcacaagaaggcgaatatgcactactcatagattctccggtagatttaaaagtgattgatgggaaagaatatagatcatttagtgctatattgttagggttagtgccacacaaggatacggcaaaaggcgtacatattaaggccgatgggcatattagagtaacaatacaagaaaatcctacacatcttcatatgggggattcgattattgtttatggtacgcctagatctctctatttgacagaagagagaggcactattgataagcgaaataaggcaattcgtaatgaagatatgggtgccatgtttgatggtacctataaggtggtggatttacacgctctaaaagagtataagatagattcttatatcggttattatcaacggtgtcttcacataattgattcgatgcgtagtgctgttgaagtattgatggagcagtatctatcagatacaaccaaatggctgggaatttcattagttctaggaggccattatggagaattaggtcaagatgtgctacgtcaatttggctacactggtatcattcatattttatctatatcgggttcccatattgcactgttattttctatcgtatatggcctatgcagagtatgtcgtatcaggaaacgttatgctatgatgggtggtattatactatctatcttttattgtatagtagttggtttcagtgcacctgttgtgcgttccaccataatggggatttggcttgctttagcctatgtaaagggccgtatgtatacggcgaagcaaggattagcagtgacggctatactgtttttactatatgatccgttacttttattagatgtgagctttcaactatcctttggagctacctatgggctcttattatttggcatgccattatatcgatggatcacagtattgccaccgattgtgaaagctccactagtactctgcatcagtgcacaacttttattgataccgttccagctctattactttcactatttgagtttagcaagtctttttgcagctattattattacacctttacttgatatagctattgttatgttatttggttgtaccataatatccttacttataccaataggtgtggtttggaacgtaatcgactggatattaactatctgtttatatgtaaatgcgcatctcgctaacagttctatatgtctatggtggataggtaccatttctgccacattaggggtgttatactatggatgtgtgggattactatatattaacctagtctcattaaagcttagatttagaactttcacaaaaggaattgtacttatgggaattggcataattgctatagcttatagtggcatcttatataggaatgaaacgattttgcatattatacctatgaaacagtcaaatgcattcctcattgttaagccttatgaaaaaacggctatggtatatattgatacacctgatgctattccaatgaaagctagtgaaattcgcgtaagaaatggactccaaagttttggtattccattaaaaaatgctcatgttcaacgatttcaatcgacgggcaaaaatactgttttatacaaaaatgatttaacgtctgtgatggtctataatagacaaaatggtgaaaaaaaactacaattaaatgatatgaggaacactattttgattacctctcagtcgtatatgatgaatcaaattgtagcattacatttgaatcatcccgtgcttgttagcatgcctcgaggagcgatgcgagacattgatcccgatgcagaacatgttcatttatggggctatcaatatattccggactatcgattatgaaaggaggactggcgatgaatcaagtatatctaatctatggtaatgaaccacaactcatagaagaagagaaacaaaagtttttcttatctcataaaaacctagatgtgcgcgtgttgcatgatgaagcaggtccttctaaaatatcagaacaattgatggaggattctttatttggcgatgctaaggtattttgtcttatcaatctacctatcttgaaaaaagcaggccaaaaagagagtcaagaatgggatgcactggccgagttgctgattaattataccggtgataatccagtacttattatctatcacgatatggtggataaacgattaaaacaaaataaaaagatattagaatctattcctaataaggaatgtaaacgattagaaggtgacgatttattgatgtggattcgtcagtattgcacctctaatggatatacgctaacgcctgatgggcacgactatctatttcatctattggagttatggcaagatgtgccggttgcgtttatgcgtaccgagtttgatcgatattttctgttattaggtaatcataagaaaattgatagatcctttttaatggaacatagcagtaattatggagctaaaaatatctttacctttaaagaagctctattaaaacaagatgtgaataccttattagaattatttccgtttatgtttagctataaagaaatcgatcgcgctatgggctatatcgaagggcaattgcggctccaattattggtaagcgaatgtcgtgctgcaggtatgacagctaaacaggtagaaaatttttgtaaagaaaatggggcctcttataagccgtaccctataaaactggcctatgaagcaagttctcgtatttctataaaggctttaaaagcactcttaaaaggattatatgaggtaatattagatagtcgcacaagcaaaggggatatgtggcgatttagggatttatgtttgacctattgtgggtataagggataaaaatgaaagtacgttatcgagtagtaccaaaacagaatagtaaacctgctttctatgtgaattgtgatgataaacaggtaaccatacaagcagcagattcagcatttaaaacattagtgtcattacaagaacgattagctgcttggtacaaagaaaaaaatatttcctttgatacgattcctaccaatgcaactacatcttgctgctttgcgtggaaggtagatgacgataatgaagaatttgcaccatactactatgccggtggttgtggtgtaggtgaatttattgaagacgttgaagcgcatcgtcagaaattagaggaagaaaacatgccagagagaggaaagtcctttgctggcaataacgatgatgaaattgattatgcagatgagtttgtgccatttatggatgcggtggaattggactattttaatccagaccccacatcgtatgagtctgtaactacaagaaatccatctgtatctagtagctcatcatctacatcttcagttaatagcggacatcaacacaaaggtggtaagaaatatccacaacgtgctcctaaggatgcaccaactgatgagggtatgattttaggtccacgcattgagggcacgacctccagcatcatgggcactgtagaaacaccaagtgttatttttgaaggtgtgttcgttggtcttgataaacgcgatactaggactggtaaaagtattgtaaatggcagtattgtagatgatacgaacagtatgaagtttatcaaatttacgaatagtccagaagaaggggatgccttattaaaacaattaaagaaattgcaaaaggtgcgcgttcaaggtagtgtcaactttgatgatcgatttgataaggactatattttatctatacgtagtatcgaagctatcgaagaagacaatataaatgaacggacagaggatagaccagattctcgtgttgagcttcatcttcatactaagatgagtgataaagatgcactcgtatcgattaaggatttatttaaaactgtcaaaaaatggggccatcctgcggttgctattacggaccatggtgttgtacaagcctttcctgaagcacaagcacttggtaaagaactaggtgttaaggtaatttatggcgttgaagggtatctcgttgatgatgcggatttagaaaaggaattatccttagacgttgtaaaacgaaaagatgaagcacctcgttatcacattattttgttagctcaaaacatggtgggcttacgtaatctgtataaaatgatttccatatcccatttggaatactataaacggagacctcgtttgcctcgttctatcattgaagagcatcgtgaaggtattcttatagggtctgcctgtgaagcaggtgaattgatgcaggctattgttaagggttcctccaaagaagagctattaacgattgcatcattctatgattaccttgaaattcaaccacataccaacaatacattcttaattcgcaagggtatcgtgccagatgaacaagctcttatcgatatgaataagacggttattgaattgggcgaagccctcaataaacgtgtatgtgctacctgtgatgttcattatttaacaccagaggaaaagatatatcgtgagattatgttaaccgcttgtgggtttcctgatgcggatgaacaaccggatttacatttgcgtactactgatgaaatgttagcttcattcccatatttgagtgaagaaaaggcctatgaggttgttgttgcgaatacacgggccatcaacgatagtattgaagacattaaaccagtgccagatggcacatattcacctaaaatcgaaggggccgatgaagctttcacagaaatgtgttatgtaaatgcgaagaagatttatggtgatccattgcctcgtgttgtacaagaacgcctagattatgagctcgactgtatcatcagcaatggttatggcgtgctttactatatcgctcataagctggtaaaaaaatcgctagatgatggctatcttgtaggttctcgtggttctgtaggctcgtcctttgcagcgaccatgtcggagattacagaggttaatccattgccaccgcattatatttgccctgaatgtaagtggtcggaattttatgaaaatggtgaatacgccggtggattcgatttaccgcgtcgtgactgtcctaattgcggtcatccattacaaacgaatggtcatgacattccatttgctatcttccttggtttcgaaggcgataaggttccagatattgatttgaacttctctggtgactaccaagcgaaggcccataaatacacggaagaactgttcggccgtgataatgtatttaaagccggtacgattggcaccattgcagataagactgcatttgggtatgtaaagaaatatgcagagctaagaaatattcaggctcgcagtggattccttgagcacctcgcaaaaggttttacaaatgtaaaaaatacaacaggccaacatccgggtggcatcatggtttgtcctcgtgatatggatgtgcaccattttacgccgattcagcatccggccaataaaaaagagagtggcgtattaaccactcactttgattatcactctattgaagggcgtatgacaaaactcgatattctgggccatgatgatccgacgattattcgtatgttggaggatttgaccggtattgatgcgaagacgattccttttgatgatccgagaacgctaagcctattctcatcaacagagggtatcggattgacgcctgaacaattgcaaggggaccaagtagcgagccttgccgtaccggagtgtggtacgaaatttgtacggggcatgctagaagattcacggccgcaaaccttctctgaccttgttcgtatttctggtttctcccacggtacgaatgtatggctcgataatgcacaggaactcattaaaaatggtacttgtaaattgaacgaagctatttctactcgtgatgacgtaatgaactttttaattcatcgtggcatgaataagaaaaatagtttcttcgtcatggaaaatgttcgtaaagggaagggcattgaaaagagaaataaacaaggccaagctactacggagtttgaaaaagaaatgcgagaaaataatattcctgaatggtttattgagtcttgtaaaaagatttcctatctattcccacgtgcccatgccgttgcttacgttatgatggccttccgtattgcgtggtttaaggtatatcatccgttggcattttacgcggcctatttttccatccgtgcaaaagcctttgatttacgcatcatgaccggtgatttgaatacacaattgaaagaatttaatcgtatcaaagctcttgaccgtggtgccagccctaaggaaaaggatttgatgtccgccttggaggtatccatggaaatgtatcaacgggggtatcgatttattaacgtagatattcaacattccggtgctcgccgatttagcattaaggacggcgcactattaccaccattcttagctatcgattcacttggtgaaaccgttgctgatgcaatcgtagaagaacgagaagcaaaaccatttacatcgttaaaagacttgcaacgtcgttgtaaggtatctgccacaatcattgaaacaatgaaagaacttaaatgctgtggagatttgccagaagacgaacaaatgtcactgtttggctaataaatttaaaaggtgtcatcgttagatgacacctttttttgaaagttttgcaatttaattattttggcagattttagtataaggatttatatttcatccagttagttttagccatttctttaagttccgtaccacgtccatcaaggatggcgttgatcaagtatttactaaagccttttgcttgttggtatgcaatttttggaggcatagcaagttcttgtttatctacacggacattgataatgacaggaccttcattatagtttagagcttccttgattttttcatcaacttcactagagtttgtaatgctaatacctttgataccagctgactcagcaagtttaccaaaatcaggatttacgaagtctgtagcataatctaagtaaccagatgctttcatttccatggcaatgaagctaagttcttcattgttaaatacgaatactttcacaggaagatttaattgttttaatgacaacatttcacccatcatcattgtaaaaccgccgtctccagaaagggagataacttggcgatttggacatgcattttgagcgcctattgcatgcatcattgcattggccatggaaccgtggttgtaagacccaatgattcgacgtttaccatttgttttgatatggcgtgctgtccagataacaggagtgcccacatcgaatgtaaagatggcgtcatcagcagccaatttattaaggcggtttacaaaatattgagggtgaattgctacgccatcaggttcagcaacggcatagctgtccaaatcattgcggaatttagtgtatgctttacgaacggtatcgatgaattctgtatcatctcgttgtgtaagatgagggagtagttcgtgtaaggtatcttttacagaaccaatgataccttgtgttaatggaacgcgtgcaccaagagcggatggattaatgtctacttgaattaccttagcattttcaggatagaatggacgataagggaaatcggtacctaacatgattagtgtatcgcattgctcaatagcacggtaaccggatgtataaccaagcaaacctgtcatgcccacatcataaggattgtcccattcgacccattctttgcctctgaaagcatgtacaacaggggcttgtaatttagtagcaagttcaaccacttcgtcatgagcaccggcacaaccagcaccacagaaaagtgtaatgcgtttgccattgtttatatgttggaccatttcaagaatatcctctgattgaggaattacgcgtggcaatttaggtgcatgccatgtaggtaattcatcaatttctgtttccataacggccacatcaccaggtagaacgattacggctacatcgcgattgccaactgcggcattcatggcgcggaataggatttccggcatttgctttggattagaaacgagttcacagaaacaagagcactctttaaataaattttctggatgtgtttcttggaaatagttgagaccgacttcggattgtggaatatgagaggcaatagcgagcactggtacacgattgcgatgacaatcaaatagaccattgatcaaatggagattaccagggccagaactaccagcacatacggttaatttacctgttaataaagcctctgcaccagcagcgaaggctgcagattcttcgtggcgcacgtgttcaaattgaattttcccattacgacgtaaactatcgtttaccgagtttaaactatccccagtaataccataaattctttcgatgcctgcgttagctaatacttctatgagtacatctgatatacgtttttttgccatattatcacctctatatgataattaatgttatttaaaaatataattcattgtatactataaatagtagtatcttatgattgcatattatgtgacttttatcacaatatattgtatacatcacaaaattagttcaatttctaaaagtgctatatagttgagatggatattaataagttttctcatatacaaatgtataatcttgcgaaagtatcataaaagtggtactataaacatataaattaatatgataagtctttggggataggtgaaattccttaccggcggttatagtccgcgagctatatggcatgaatcggtgcaattccgataccgacagtagagtctggatgagaaaagacaatagcacatatattttgtatgtgtatatatgatgaccccaggactatgtatatagtccttttttattgaggtattatgatgaacgacgaattatatatgaagcgtgccatttctctagcgaaaatggcaactggacatacatcgcccaatcccttggttggtgccgtcgtagtaaaaaataatacaatagttggcgaagggtatcaccataaggctggtgaggcccatgcggaagtgcatgctttagatgcggcgggagacaatgctaggggggctaccttatatgtaactcttgagccttgtgctcattatggtaagaccccgccatgtgcaaagcgtgtcgttgaatctggtattgctcgcgttgtgattggtagtaccgatccaaatccactagtggctggtaagggcattcaaattcttactgaggcaggtatagaggtaactacagatgtatgtgtggatgaatgtattcagttgaatgaatatttctttacatttattcaaacacataaaccgtttgtaaccataaaaagtgctatgtccctagatggtaaaattgctactttcacaggtcaatctcaatggattacgaatgaaagttcccgtaaggacggacatatattgcgagcgtctcatgatgcgatgctggttggtattggtaccatcttggctgatgatccattgcttaattgtaggctcactagagatgaattatatgaagcaattatcaacagacacgatgtatcgatagataatacattagaggtgcatcagccagatattattattctggatagtcaggggcgtacgccaacggatgcaaaggtatttacgataccaaatcgtaaggttatcatttatgtagcgaaaggttgtccagaacagcgtagaattgctttggctaatgttggagcgattgtagaagaactcccaacaaaatcggtgcgtcaaggtcgtaccaccgatgtagctatagatattaagaagatagatattcaagcgtgtttggaacatcttggggaacaagaatacacatcagtgcttgttgaaggtggttccaccattatcagttcctttgttgaatcgttggcctttgataaaattgttacctatataggtaatcttgtcatagggggcgcgaatagtacagctgctgtaggtggtaccggttttgctacattacatgaggcacctacactcgaatttgctagttcgcgaatactagataataatattcgtatagaatcctatcgtttaggaagggagggctcctatgtttacaggcatcgttgaagaagttggcaaaatagtaaacgttaaaaagggtgctcaatccttattattgacgatcggtggcaatacaatttttgacgatttaaaaattggcgattctgtagcggttaatggcgtttgtttaactgccacatctattggaaatcaccaatttactgcagatgttatgccggagtcaataagtatgacgacatttaccaatttaaaggtaaatcaacccgttaatctcgaacgcgctatggctgctaatggaagatttggaggtcatatcgtggctggtcatgtggatggtacaggtcgcattatcaatatgaaacgaacagataatgccattgttttcactatttctgctccaaaatcgattatggattacgtcatttataaaggatctattacaatcgatggcattagcttaacgattatggagagaactgaatcgaccttttccgtatctatcattccacatacattaagcgaaactgtgctaggccatgcgtcgattggtacagaggtaaatttagaaacagatattacaggccgttatattcgtcattttatgacattagatgagcctacacatacaagtaagtctcaaaaatccatggaatctctattagtagagaacggatttatgtaaaaggaggagttgtctccatgaattatacattgaatacaattgaagaagttcttcaagatatgaaagttggtaaacctgttattatcgttgatgatgaaagtcgcgaaaatgaaggggatttaattatcgctgccgagtttgctactcaagaaaacattaatttctttgttaaatatgcacgtggtatcgtgtgcactccaatgagacgagaagctttagaacgtcttggcattcctgtaatggttacgaagaatacggataaccatgaaacagcgtttactgttactgtagaccatgtagatacaacaacaggtgtatccccagcagaacgggcctatacgattcaaaaactattggatcctaatgcaaaacctgctgatttccgtcgccctggtcatgttttcccattggtatataaagaaggtggcgttctcgtacgccaaggtcatacggaagcttctgtagacctttgtcgtcttgctggtttgcaagaggctgctgttatctgtgaaatcactaaagatgatggtgatatggcacgtttaccggatctaatcgaatttgctaaggaacatgacttgaaaattgcgtccgtagcagaactcatcgaatatcgtaaacaacatgaagatatgatcggattaggcgcttgttccaaattaccaacaaaatttggcgatttcaatatcttcgtatttaaaaatgatttagatcataaagagcatcttgcaatcgttaagggcgatgtacaagattgtgaagatgtacttgtacgtattcactccgaatgtttaacaggggatgtatttggttctaaacgttgcgattgtggtgaacaattagaaaatgcactacgggctatcgaaaaagagggcaaaggcgttgtagtctatatgcgtcaagaaggtcgtggtattggcttaaccaataaaattaaagcctatgcattacaagaacaaggccttgatacagtagaagcgaatgaacaattaggtttccctgcagatatgcgcgaatattctttagcggctcaaattattcgattcttaggtattaaaagtatccgtttattgacgaataatcctgaaaaacgccatggcttagaacattggggtgttgatgtacacaaacgtgtacctctcattattcctgctaacaaatttaatgcaggctatttaaaaacaaaagaagaaaaaatgggacatatgttagaagactaatttttctttcgttatatagacatttaatctaaattcataggaggctataacatgatggttcaagaaggtaatttggttggtactggtaagaaatttgccattattggttcacgtttcaatgagtttattacatctaaattaattggtggcgcagaagattgcttattgcgtcatgatgttaaacaagaagatattacagtcatttgggttcctggtgcttatgaaattcctttgattgcaaaaaaagcagctttatctggtcgttatgatgctgttatttgtgtaggtgcagttattcgtggggctactacacattatgactatgtttgtaatgaagtggcaaaaggtattgctcacgtttctttagaaaccggtatccctgttatgttcggtgtagtaacaactgaaaatattgaacaagctattgaacgtgctggtacaaaagcgggtaataaaggttacgattgcgctatgggggctattgaaatggttaatcttatcgatcaaatctaaattaacctttgaaaacactcggtatcgtatgatactgagtgttttttatatcgaaaatatgttcttttactagaaaagatacttaaacaaacatatgttcctgcataatggaaaatatacatatatcatgctatactatataggcactaaagagtgtaatacataataatttgattatatataaggaatgattgaatggattatataaaacgttttactacccgtgaaggggttcgtatgtcattagccgttacaacggatacggtagagaccgcacgcgtacgtcatgatttatggccagtcgcaacagctgctctaggacgtgccatgacgggtgctctattactggctggtgattttaaaaaccatgagaatgtaagtcttcgcattaaaggtgatggcccactcggtgttgtacatgtcgatgcattttctgataatactgttcgcggttatgtagatgagccacatgtggatgtgccattaaaacgtgctggaaaactcgatgtgggtgctgcagtcggccaccatggagaagtacaagttacaagattcactaaattggctcaagattatacatctactagccctattcaaagtggtgaagtagcagaggacttggcgtattacctttatacatctgaacaggtgccatctacgattagcttaggcgttctcgtagacccagattatcataccattgtagctggtggttttatcgtacaagctttacctgatgctactgatgctgcattggctatggtagaaaagaatatcaatgaattaggacctgttacagaatatttaaaagaacatcctgatggcaaaggccttgttgagaaagtgctagacggccttactgttaatgaagtctataacgaaccagtatcttttaaatgtcgttgtagtcgtgatcgattcgctggcgttcttatgacattgcgtgaagatgataagaaatcccttttagaagacgaaataacagagctagtttgtcattactgtaatgaaaagtatcatttctctagaaaagaactagaagatatgtttacacctaagggaccaattcaataatagaactttttctatagattgttttatcattatgtgcgaaaatataaagatagagtatttttaataggaggcaactatgagtgcaatcggtgtaattggcggaacaggtgtttatgatccgtctatatttgaaaatattcatgaagaatccttgatgactccttatggagagattgattatgttcaaggaacatataaaggtaaaactgtgatttttgtagctcgtcatggtaaagaccatacgattcctccacataaaattaattatcgtgccaatatttggggcctaaaaaagctaggcgttaaatttattatttctacgactgctgtaggttctttgaataagaattttgaacctggtcactttgttttaacagatcaatttcttgattttacaaaaaatcgcgtcactacattctatgaaggtggcgagcgtccggtagcacatttagatgtgacaaatccatattgtcctgagcttcgtcaaatcattgaatctgtaggtaaagaacaaaaattgtctattcataatggcggtacctatgtatgtacagaaggtccacgttttgaaacacctgctgagattaagatgtttcacatgcttggtggcgatacagtaggtatgacaaatgtaccagaggttaatctagcaaacgaagcggaaatggcgtacacaacaatttctatgattacgaactatgcagctggtatttctgaaaatgctcttactcacagtgaagtagttgaaatgatgggcgaaatggcatctcaattgaaagctcttattttaggtacaattgaggtgattgatatgaacgcagattatgcagctcatcatcgcatggctgagtatggtggttttaaattataagagttcgtatccattttgatatgacaatgtggagggagttctcatgaacaatattgaatggcgtgatggtacgctcattttattagatcaaacaaaattaccaactcatgtggaatatttacagtgtaccgattggcgacaagtggcggaggctataaagatgcttcgtgtccgtggagctcctgctattggtgtcgctgcagggtatggccttattttagcggctgtggaggcgaatcgtttagctgttcccttttctgaacagctatcaaccttttatgagtggagtgaagaattaaaggaaactcgaccgacggcgattaatttagcttgggctgttaatcgtattatagcgattgtgaaagccggtccgtttgcgtctatgcatgaaattatagaccgcatcacgcatgaagccattgttatccatgaagaggatgtacaacttaacacacgcatggctattaatggggctactttatttaaaggaaaacaaaatttacgaatcctaacgcattgtaatgctggtgctttagcgacaggtggccttggcactgcacttggtgtgattcgtaaactacatgaacagggacaattggaaatggtgtacgccgatgaaacacgtccgttgttgcaaggtgcccgtttaacggcttttgaactccatgaagatggtattcctgttacattagagacagacaatatggcggcctatgcaatgcaacaaggtttaattgatgccattatagtcggtgccgatcgcatcacaacggaaggtgatgtagctaataaaattggtacttatggattagcagtgcttgcaaaattccataatattccattttatgtagctgctccatatagtacatttgattttacactcaaagatggtaaggatatccccattgaaatgcgcgctgatgatgaagtgttgacattccaaggtgtgccatctgcgcctacgggtattcatgtattaaaccctgcttttgatgtaacacctcatgaactagtaacagctattattactgaagaaggtgttttaacaccaaactatcaagagtctattgctcgcttacaatccgttgttgtcaataagtagatgtcattacggatgtatataaaacttatcatgttaacgtaagttcttttcataacctgtatattattaattgaagaatgaaggggtacatatgcaatcattaattaaagatatcaatctcgctgctgaaggccgtaaaaaaatcgattgggtttctaattttatgcctactctaaatacattaggcgatcgttttgaaaaagaacaaactttcaaaggccaaacaattgttgtttccgttcacttggaagctaaaactgcataccttgcaactgtgttaaagcgcggtggtgctgatgtcatcgttacaggttcaaaccctctttctacacaagatgatgtagctgcaggacttgttgacatgggtcttactgtatatgcttggtacgactgtactgatgaagaatattttatgttcctcaacaaagcgttggatcataaacctcatattatcatcgatgacggtggtgatcttgttaatctattacatacaacacgtactgatgctaaagaacgtttgttaggtggcagtgaagaaactacaacaggtgttcatcgtttgtatgcattggaacatgctaaacaattaacattccctatgattgctgttaatgattctaactgtaaatacttatttgataatcgctatggtacaggccaatctgtctgggatggtatcatgcgtactaccaaccttacagtagcaggcaaaaacgttgtagttgctggttatggctggtgtggtaaaggcgttgccatgcgtgctaaaggcttgggtgcgcacgtatttgttacagaagttgatcctattaaagctattgaagcagtatttgatggcttcactgtattgcctatgatagaagctgctaaaattggcgatatcttctgtactgtaacaggttgtaaagatgttatcgtaaaagaacattatgaagttatgaaggataaagctgttctttgtaacgctggtcattttgattgcgaagtaaatgttcatgatttagaacaagtagcggttagccatgaacgtgttcgtcaaaacattgaaggctatacaatggctgatggtcgtaaactctatgtattggctgaaggtcgtcttgtaaacttagcagcaggcgatggtcatcctgctgaaattatggacttgtcctttgctatgcaagcattggctgctgaacatgtattaaacaatggtaaaaacatggagccaaaagtgtatgtattgcctcgtgaacttgatgaagaagtagcaaaaattaaattacactccatgggctacgatttagatgcattaacacaagaccaaatcgattacttaacaaaggtaaactaatataatctttaacttgaacatctaactaacagagtctatatagactctgttgtacctatacaaggaggcattatgtcagatttattaattaccaatgtagatgttcttaccgacaatggaacattaaaaaatcatgctattgcaatcgaaaatggttatattactgctatcttaaccggagaagaagcaaaatctgcacaatcaaaggaaacactagacggtaaaggtcaattggccactccaggtctcgttaatacacatacgcatatagcgatgggattattccgtaactatgctgatgatttagaacttatggattggcttgaaacagcgatttggccaacggaagctaaattgaatgacgatctggttaaatggggtacacaactaggtattgcagagatgctacgttctggtacgactacatttagcgatatgtatttctttatgaatacaacaggtgatgttgtgaaagaaaccggtattcgagctgtattgtcccgtggtcttgccggtgtttctcctacagctgatcaagcgcttgtggaaaatgcagatttgttccgcacttatcatggttatgataatgaccgcatcaaggtcctattaggaccacatgcgccatatacttgtccagatgcgtatatggaaaaggttattgctttatctcatgaactaaattgtggcattcatatgcacttatccgaaaccaaaggggaagtggagaatgttataaaagcgactggtaagacaccaatcgctcatatgcatgatttaggtttattctggaatactacattagcagctcactgcgtacatgtaacagaagaagatatggctattatggctgaaaatgatgtagctgtagctcataatccacaatctaacttgaaactagctagcggtattgcgcctattcctgaaatgatagaaaaaggtatcactgtaggtcttggtacagatggttctgcatcaaataacaatgcggatatgcttgaagaagttcgtttagcagctacattacataaagctcgtctctatgatccaaaggctattcctgcacaagcggcttggaatatggggactatagaaggggccaaagctcttggatataatgatctcggcaaaattgcagtaggtcaacgtgcagatatcgtattatacgatgtatctggtatgcattggatgcctcgatataatgatgtagcagcacttgtatactcagctaatagctctgatgcgaatacagttattgtagccggtaaggttcttatgaaaaataaagaactattgactatcaatgaagaaaaattgtgtagcgaaatcggtaaggctcaagagtattttaaaaactaagattatatacctcatataatgaaaacccactcatgatatatttcatagagtgggttttgtattgtctagcgtaatacgaattctatttaatagctttcaccaaaaacataggtactgggatataaaattcatcctcttcgctgtatatacgaggacctacagtaggatcaatagatacagaactagcacctatcttagtgagcaattctatgtcccattgtggacgtgtaaaggaagaaatatcaagcatatgataaatggtatgacaacgttcctttagttcattactcacatgttcatgtgcatgatgtacagattgtggtaaattatgatgattgcgtgcatgttccgcatcatagtttagaattaatccaccaggacggatgacacgcaaccattcagcataggctttatcaggatgtggtaaattccatgttacgttacgagctacaacgatatcaaatgtattcgtatcaaaacttaaattttcagcatccataacagagaaggtagcattagaatctaaggattgggctaattgctttgcctcttcaatcatattaggtgtgatgtcaataccatgtactgtatgacccaattcagagagaataatactgaaaaaacctgcaccacaaccaatatctaaaatacgtaaagaacggtcagaatcaaaaatatgactcattaactcatcacgccaaagtttaagtttaggactttctaattctttagctcgtaaagagccaaaatcacgagctcggtcactccaataggaggtaataaactttttatcatccttcataggatgatttttttcaaatatatcattcattttttcagttctcctcatttttaatacacttaatagtaccataaaatgagaatgtgccatactataaatatcacacttactccataaataattaatattgagtatgatataatacatctatatttttgttttatgaaaggacaggataatgattttacagacgggacagcgtacggatattcctgccttttatgggcaatggttaattaatcgcgtccgccaaggatttgtagatgtacttaatccctataatccgatacagataacacgatatcctatcaatcatgaggttgtagatggtattgcgttttgtacaaagaatccgttgccgttcattccgctcttacatgaaataaatgattatagacagtattggcatatgactataactccatatggagcagatatagagactaatgtaccacaagtggatttagtaatagacggatttaaacacatatctacaaaacgtaatcctcagtccatggtgtggcgttatgatcctattattttaacccacaactatacagttgattttcattttgaaagcttttataaaatggctaagtctctagaaggctacacagatactgtagttgtcagtttcatagatatatttgataaggtagctcataattttcctgaaggttatagaccgagtttagatattcaaacaaagatcattaaagaattagtatctatagcgcattctcatcatatgatacttaaaacctgtggagaaggggacgttttcaaagaattaggtgttaatacagagggctgtcttacgctcgactgttatgaacgtgcttggaacgtaaaattaaaagcaccgaaacgtacaccagctagaccagagtgtaattgctatttacatggtgatataggtgcctatgatacttgtagccatttttgtcgctattgttatgctaatacaaatcaggctgcagttcgccaaaattgctcattacatgatccgaactctagcttgcttattggaaaactttcaaaagcagcaattattaaagaaagtgcggaaaaaagctggattgtagatacacattacacacaagattccttattttaaggagaattataatctgcttttacgcctatagcgttgacgtatcgtgtaaaatatagacaaaaggagttgggacatctcaggaatataagagggtgtaaagcctattttttgtttattgttttattattacaaggaggtggagtatgattacctataagaataaaagtaaagattcattacaatcgctagaatcatctatgccagttcttgctatgtgttatgattttgataagaccttaacacctgatgatatgcaggcacaaggctttattcaatctgttggctatgatgaagagcaaatcaaacagttctggcaagaatctaatcaactggctaagaaaaatgatatggataataacttggcttatatgtacaagatgattcaagaagcagtgggccgtttttatgtaactcgagaaaagcttatggaatatgggaatcaagtggaactatatgaaggtgttcgcacttggtttgaacgtattcgtgaatatggtttagaacacggtgtacgcattgaacattacatcatatcttctggtttaaaagagatgattgaaggcactgaaatggcaaaaaatggggctttcaaaaaaatctatgccagcgcatttatgtttgatgataaaggcgtagccgtctggcctgcacaagctatcaattacacgaataaaacacagttcctattccgtatacaaaagggcgtgttagatataaatgatcctggtgtaaacgattacatccgtcctgaagaacaacgtgtaccgttccgcaacatgatttatataggtgatagtgatacagatatcccttgcatgagccttgtcaatgtcaatggagggcattcaatcggtgtatatgatccagatagcaagaataaagataaagtatataaaatgatgcaacatcatcgcattcgttattacgcaccagcagattatacagatgggtccgatttagacactgtagttaaacaaatcattcaaaaaacagcagcttatgaggcgctagaacaacaatatgtacgtaataagcatgaagcagaatcacatagttaggagtttctataatgaatacacaggatatatcaaaagaatggatagacacatttaatcatctcggcagtgaggggaaattaaaagcacctgttgattatcatgccatattcgaagctgatgaactatttggtaaaaaactatatacattgccgatgggatatataactttaccaacaggtcgtatttttgcgtgtgatccattaacacatttagctgctgttgataataagacatatatacgtaccgtagatcctggaacatatccaatagaaactaaagtagctgaactagatacagattattatcgttatgtattaactagggtgttgtttaagaatacaaaacctgtacaatatgagttagcccttaaaggtcatgaggatttaagcgagttagaagatggtgaaagttatattggttttcctgtagatgctggattggcaacacttgttgatgaagcaactgtaactgcgtatagagaatttgatcgtcattggtatgaacaacatcctaatggcaatatttatgatgattactttgacgagctatttaaattaaatgctatcgcttatcctaaatttcaacgacctggtggcgattggattaactttaaaattccaaacaccgatttgtatgtaccgatgatacaatctggctttggtgatggtttatatcctgtatattgggcttttgatgaagccggagatatatgccaaattattattgaattcataagctgtagctctaatgagtagtaataaaaatagtatatagatctatggatagaaaaataaggcgcttagcaatgctaggcgcctttaatgtattaattttttatttgattattagatgccaaaaatccagttaataactacacgtaaacaactgagacctacaacgatttctgcaagaaaacgcaaggaatgttccataccatttccgagattttttaaactgccaattttagctttacttacgatatcacaccagcacatatagtgatcctcccttgagagttaatatgagaaatatacatagtttatatgactattttacaactatattcgataaatttcaatatagaaaataaaaattatgataaaataataataattattattgtgttatatgaaagagggtatattttatgaggagaatttttattgctttagcaatacttcttgcactaggtaatacggctgaagctaaaaactatattacgttagaatcgccatcaggaaatacaattgttgatgaaacaggtaagtggattttaggtccttataaagatttacatgtaaattacattattgactttggagagaactatgcatatgcttcgttttatgataatggtcaaaaacgctatataaatttaaatacgatggtttatttaccggcaggatatgattacgagttttcttatgagtatgcaaaggctttgacaaagggtggatttaagttagtaaagtctgatggtacatatgctataaatgatgttgttagtgcttataattattgttcggataatttaatatacggtaaaaagggtgagttttggtatctttataatataagtacaggttcattagttatagataatcctattacaagtacatgggaaaatgtaaataaatattataatggatctggagcggttgtactattaaaaatagatacagcagacggatatgtcaaatatgtaactaatgatggtatagaaatagatgaggatactgcgattcataatataaataaatataattatgaactcatggatggtgctggtactggagatggagaaggaaatggttataatggaattagatatagtcgacaaccggctactcaattcataccattttccattgttgataaaaaagggaaaactttatatggtattagattatcgaatgataatgtattaattgctcctaaatacaattatatagaacctttaggagatgattttaagtattttattgcagcggataaacataataaatatggtattataaatgttgtagaccaagtagtcataccatttaaatatgattcctgtaaaagattaagtgatcgtagctttgtgttaaaaacagctgaaaaatcttatatttttaatgcagaaagtggaatattagttgataaggcttatgatacgattgacacatcaaaaccaatttatatgattgataaatttactgtagccacattagaaaataaaaaatatataattgattctaatgatggtcatataatattaacattgccagaaacaattgatgatatcacggcttattatgataatttatatgtagttaaatctggtaatacatatggtcttatgaatatgtatggtaaaattttagttagtcctgagtttaataaagttactattgatgagcctaaatttaataactatatgaaatacttatcggaacatgatgattaatttattgtaaaaaaataaactagcttatagaaatataggctagtttttctttttttgtaattacttccgataacgataatttatcggaagtaatttaagacataaaaattgggcctaagctaggcccaatcaatattttaaaggttattagtttttacgtttaaatgtatatggttcgtattctacttcgtttttacgaccagtccaccaagaccataacgcttttgcgattttccatgcaatgcaacccacgataatacctaatactaatccagttaatacatctgttggataatgtacaaataagtatactcgtgcaaatgctactacacaggcaccaatcaacgctataacgccccagaatctctttgttggacatatattacttaatcctaagtataatgctgttgcagccgcaaatgatccaaaactatgccctgatggaaatgaatatgtcgttgctgctggtggcggtgctaccaatggtacttcagggaaatctacaaatggtcttaaacgcgctacatgaggttttaacccttggtcgcctatgatgaatactaagactaaggaaatgaacattccaaggccaataacgcgatatttcttttgaatcattaatataatagaaattaagatccataaagcacctgcacttgttatttttgataaccagtacatgattggtgttaaataggaactaataaaatgttgttgtatataaaatatgactgtatggtcaaattgtaaaattgtatccatagtgaacctcaacttatgattttaattgataattattgagaatgaaatgtgtaattttagcgttttcaggtataattaccttactacaagttaaaataatagcctaatctatgcattcggtcaatagattaggccatatttaatagaatgttaatatttatcttttggttttactctttggtgagtctttttttgcaggttctggtgctgcaggtttcttagtaataatcgtatctactggatcatatgtagactcaaatacatctgttgtagtgacccaattaccatatgttattgtacgatatgtattaattctaaatccaatatgaccttcttctgtactatcctctttggcagaaggatctattttggtaatcgtttgatttggaatatccgtacggtcgccaacactgatggaaacagacttcggtacgtcttctggtacacctatgatatatattgttagttgtccgttattcataacacttaatacatagatattatgagcatatggatttttaaattgaaagtccaaatatccgtatgcaacggttgcatcacgtcctgcaggaatatagctaacaggttcaaaatgaggtgtccgttcaatgatgttcataccagatagtaatgcagtgttaaataatgtagagctaacttggcaaataccgccaccaatacctggtactaactttccatcaataataaccggtgcatcatcatagccagcttccgccgtacgttcaccgacaacatcattaaaggaaaagacctcgccaggtttgattagtgtaccgctaattttggttgatgctagctcaatattatgagttctattggtgttagacgtatcaaaatttgtagtataactacctagaacagctgttaatggttttacatcatcgtttgtaacacgaactgtatctttagatgtaaattctatagaaatattgttaaaatcattttcttctagttgagcttttaattgtttaattgtctcatcaatatcaacgcgttttccttcttttgaaggtgtcatcttgacttggccattttcaaccgttaataacgcatcatgacctgatacatcgatttgttttgctaattctgtaaaatatgcttttgctgttacttcatcaagtttatatacaggatttatatgtactttataaataaaagcagtaatcctatgcatgatgagtatttttaaatcatcttcataaccataggtaaaaatattagattccgtactagctgtatcaagcgtaattcctaaatcttttacttttacttgtcgcgtaccttgatttggtattgttatcgtaattgttttattattactagcctctgtatgaattaaggagctaacagcatctctagaatatcctgagatatcttgatcctcataatacaggccatatgtaattgtgccatccataggaattaagctgcaaccactagtaaatagacaagaaccgattaatacactacataataattgttttaagttcatcattatatctttcaaataaaattcgagaaatttggttcaaaatcatctaattatagcataattccatgtttctatgtgatacaataatagcatagtgttagtaaaaggaatatatatgtcacagtctaaagaagagaaaaaacatttctatttgcgccataatgatgcgttaatgaatagtacaaaattatcgatgaaagcaaaacaaagcattttactttcaaaggctgaaaatactgtaaatgcctatgagtcagattgggatgacttcgttgattggtgtaattaccaaaaggtatcctattttccagcaacaccagaaacaattgtcaattatattaatgacttagcagattatgcaaaagctaatacgattgctcgtcgcattagtgccatatcagaaaactacaatgcttctggggctagagaaaatccatgtatgtcccctcttgtgaaacaagctttgcgagggatacgacgtttaaagggaacctttcaacaaggtaagacccctattttattagatgatattgaagatattttagaatgtatcgatggtagtgatattccaaagatacagaaattacgagataaagcaattttactcattggatttatgggggcttttagacgcagtgaaattgcagccttaactgtagagaacttaaagttttctccacaaggtcttgagatatttgtcgcttcatctaaagctgaccaagaaggtcaaggtgctattgtagcgattccaagtctacaaggttctccattggatgccgtacgagctttaaaaaaatggttaactgccagtggcattacatctggacctgtatttcggggctttactaaatcaatgtcattacgaaaaacggcaatttctgataagtccattgcagagattgtaaaaaaatatatttctcttatcggactcgatcctgccatgtatggtgctcatagtttaaggcatggctttgctacgactgcagccgcttatggcgtcgaggaacgtaatatcatgcgtcagacgcgacatcacagtgtaaatatggtacgccgttatattaatgaagcaaataaattcgtcgataatcctatctcaacaatttttgaaaaacgattaaaataatattatataatgaaaatggctagtatagatggttttctcattgaagaacatctatactagccatttcgtatatatttaattttgagccatatagtccatagctcttgttggactatcagttttatatacaggcacctttattttggtccctggtgttaaattaccagaatcagaaatattatttaattcctttactgtatgtactacctcacgaacatccacattagatgcagttgaacgcgatgcaatatcccataaggtatctccagattttacagtaatctcttgaacactatgtgattccatagcaggagttgtttgttgataaccgataaccattgcaaaacagataccaagcataatcataatgtgtctcataatacattacctcttttatttatcgaacataaaattcagaacgtttgtttgtttacaataagataatagcacacaaacggatgttcggtcaagcattttaagaacaaatgtttgcaaaagtataaaaatatctatataatagggatataaagaaaataattatagtatacacttttacatatcccatttttagtacatatatggaggttcctgtgagacgcccagctactgatattaatacaaaacaacgtcgtatattagagtttattcgagattctttacataatgaatatcgttgccctactgttcgtgaaatttgtgcttatgtaggtcttagttctacgtccactgttcaatcacatttaaatacattagaaaaatttgggtatattaaacgcgatcctaataaaaaccgtgctattacgattttagatgaaggaaaaccgaaggtttctgtatctaaagagaacaatgaaactactagctctgataattttgaattccttggtgcaggattaaaacaagttcctcttatcggtacagtacaagcaggcacaccaattacagctgttgaaaatttagaggctacattgaccttacctgttcagcttacaggtgattctgattgctttatgcttcgtgttcaaggggaatcgatgatgaatattggtatgtatgaaggcgatatgttaattgtacgtcatcaaaatacagccaataatggcgatattgtggtagctcgtattgatgatgaagcgactgtaaaacgtttctataaggaaaatggtcatattcgtttacagcctgaaaatgataattttgatcctattattgttgatgattgtcatattgaaggacttgtcattggattagtacgtgatagaatataacaaaaagacggcaacatatgttgccgtctttttgttatattgagattttatttctacgtatactagcgaaaattgcaccagatatattatgccatacactaaaaatagctcctactagagttgcgagagggtttaaagcaaaattagttgctgctagcgttacggctaacccactattttgcatacctacttctattgctaatgcagtagttttatcgtattttaatttaagagtttttcctacaattaaccctaatagtaatcctaatacattatgtataccaacaataataagagttaataagccagaaaccaatagtttatccctattaactgcaataatagctgctattaataatataatagcaatcattgaaaatataggacttatactggtaagtgtattaatgtgtgatttacaaacatattgaatgacaccacctaataagattggtataataatgactttcaccattgtaatcatcattggtagcaatgcaacatctacccaagcaccaccaatatataagattaataatggtgttacaatgggtgctattaatgtcgatgtaattgtcattcctactgatagtggtacatcacctttagcgatgtaggttataacgttactagccgtgccaccaggacagcaaccaactaatataacgcctattgcaatatctggtggtaaggtaaatatatggcaaattccccatgctaataaaggcatgattgtgtattgtgcaagcactccaatacaaatatcttttggatgcctaaaaatattacataggttttcaaacttaattgtaaggcccataccgaacatagcgataccaagtaaaaatggtgtataagcaacagcccatgtaaaatatgaaggaactatataggccatacatgaaaaaccgatgattagaaccattaagtatttagaaattaactgagtcagtgtttgtaaatagttcatagtttctcccttctaatttgcatcgaaggaaaagttatcgataagtcgcgtagatccaatatatacagccatagcgactaatactggagatgtaatctcatgaactggttgcattgtattagcatcaacaactgaaacataatctatcttggctaagggctcagtattaataatttctgtcatagtattaatgatactatcagcagaagcaccatgtttaatggtttgttttcccatttgaatagctttatataatatggtagccgcttttcgttcttccttagataaatatgtatttcgagaagattttgctagaccatccgattcacgaacgattggcactccaattatattgaccggaaaatttagatcataaaccattttacgaataatggctagttgttgtgcatctttttcaccaaagtaggcattggtaggttgaataatattaaatagcttcgttacaaccgtacaaacacctttgaaatgaataggtctactaataccacacaatgtatcagataactcaacaatatttacaaatgcttttctatcatgatacatttcatctgacgttggagaaaatataatatccgccttatgggcttcacaaagggatttatctctattaatatcacgtggataagaatttaggtcttcgttttcaccaaactgagttggattaacaaatatagatacaatgaccttatcattatcctttctagcttgatctatcaatgcggcatgaccatcatgtaaatatcccattgttggtacaaaaccaatagaatatcccttatctttccaatggtttactatgctgcgtatattttcgattgtagttataatttccataataatgcctccggtacttataaattgtaaatacgaagatagtcctatacagtctactgtaattcgatcaaaaacagttagtcttgatcaactaataaaccatgtttttcatagttttttatatgacttatcttattattttcatctacaaatacaacaagaggcttatggctctctacttctttttcatttagttgagcataacacatgataattactttatcatgtacttgcacatgtcttgctgcagcgccatttaagcatataacaccactgcctgcttcgccagcaatcgtatatgtgctaaaacgtgctccattattaatgtttacaatttgaacttgttcatattctcgaattccagatgcattcaataaatctgtatcgatagtaatgctcccgacataatcaagttctgcttgtgtcacagtagctctgtgaattttaccttttaacattgttagttccatgttaaactccttgtgttttaatgtaatcgccttatggtcgattcgaaatatcacaatcattttgtttatcatgaattaacagtagactagagtatagttaaaaatactatctccatgtgagattatatcataatacaatctttataagaaaaaaatatatttataggcatataaaataatatttataatgtatttcttataaaataaaaccagtagttataaatcatagctactggttttagtatcgtaatattttattgtaaatattcagctaatgccttatcaatgtatgcagcttcttcttgagaaggttcacacataggtaagttgaatatacctgctggtaaacctaattttcgagctgcatatttaactggaattggatttgttgtaatgaacatagctctagtaatttcagctaatttttgatgtaattgtgttgctttttgattattgccctcttcaaaggctgcaatcatatcgttcatatcttgaccggccacatgagatactacagaaataacgcctgtgccaccaacggaaagaataggcaatgtaagaccatcatctccgctgtataccatgaaatcttcaccaggcattaaacgcttaatttcagaagcaatcatcaaattaccactagcctctttgatggcacaaatatgtggatattccttatggaggcgtgctagtgtagctggaaatattccagttcctacgcgaccaggtacattgtataccatgattggtaacgttgtagcctctgcaatagatttaaaatgcaaatattgaccttgttgattaggcttattgtaatacggtacaacaactaacaatccatcaataccaggaatcgtagatacttctttcacaaagtctacagaaccttttgtatcattggaacctacattagctataatagtacctttatcaccgcacgtttcagcaatcgctttaaataaagtaattttgctttcacgggatatagtaggattttcacctgtggtaccacaaacaactaagccatcagaaccatgatttaatagatgctctgcaatggcaactgaattttcaatgttgactgatccatcttcgttaaacgatgtaatcatagccgttaatacacgaccaaaggttttcatatgtttctcccccttgatagatattaaaatgcttccttttctaccaagtattctgcgatttgcaatgcatttagagcagcacccttacgaatttggtcacctacgatccagaaattcatgcctttatcattgtataaatctttacggatacgaccgatttcacagtcattttgattagatgtatatagtggcataggatattcttgttctgctggattatcttttacttgtaatcctggaaatgcagcacaagccttgcggaatgcttctgcagatactggttcttctgtttctactaatacggattccgaatgagagcgatatactggaacacgaacagttgttggcactacttgaatggtgtcatcatgaagaattttgtgtgtttcatttaccatcttcatctcttctttagtataatcgttttctaagaatacatcaatttgtggtaacaaattgaacgcaattgggaagtgttttggtgcagaacctgttggcaacaagttagcagtcatttccttgccttcagcatattcttttacttggttttgaagttcttcaataccttctttaccagcaccagatacagcttggtatgtagatactacaatgcgtttaattggagaaatatcatgcaatggttttaagccaaggctcatgatgattgtagaacagtttggattagcaatgatacccttatgtttcaaaatatcttcagggttaacttcaggtacaacgagtggcacctctggatccatacggaatgcactggagttatcaataacaatagcaccgcgtttagcagcttctggagctaatgttttagaaatagagccacctgcaaataatgcaatatcaataccatcaaaggattcaggttttgcttcttcaaccacataggttttcccattaactgtaagttcagtaccagcagaacgagcagaagccaatagttttaaattttcataaggaaaattacgctcttcaataagtgtaatgaattctgcccctactgcaccagtagcaccaagaattgcaagattaggttttttcattgtgtatctcctcaattaatcaattgttgttcagtattataaataatgttctaagccatatgttaagcctggtttagaggcaattttcttacatgctagaacgacaccaggcatgaaggataaacggcttaagctatcatgacgaattgttaatgtttcatcatagccgccaaataatacttgttgatgtgctacataaccaggaagacgaacgctatggatagtaacattgtctacttttgcaccacgtgcacctggcaaactttcacgtgttaaatcttcagaacctgtcacatttgcagcctcttttgcatcattgattaatttagccgtcaaaatagatgtaccagatggcgcatcatatttatggttgtgatgtaattcgataatttctacatcaggaaaatatggcgctaattcagcagccactttcatcatcataacagcgcctaatgagaaattaggtgctaccaaacaattggcattatgttttaaaccgatttcattcaattcgttgcgttgttcttcagttaggcctgttgtgcctattacaatatgcacgccagcactaagaatttttttggcattttcgaaaataacagcaggatttgtgaaatcaacgataacgtcaggtttattatcgctcaatacttcgtcaatagtttcagccattgtgatatgtaatggttcaattcctgctacagtgcccacatcttgacctgctttagatggatcgatgccaccaatcattgtcaattcagaatctgcatgtactgcttttacgacttcgcgacccattttgccgcctgcaccgtttaccattactctaatcatatttacctccaaaaaagccagtggaggcatccactggcttaatatatacgatatatgacacatcgttcattaaacaagaattatgatagcactccaccaatgtaatattggtgacagtcgtctacctattaaatagacaaccagcacgatgatttggctgtcatcccacttcggcaagtacaccttttatcatgaatcattgtttgccggctcctcatgatgactatttatacccgcgcctctaccttattattgagttaatataataagtataagtaattatgcgtatttagtcaatgaaaatggtcaataagttcttgtgcagcagcaagtgctgtatgagacattcccttgccggacatcatggatgcgatttgtgaaagccgttcttcctcgctcaattcagataatgtagaaatagtgcggccttcttgttcttgcttagataagtgataatgctgttttgcaatacttgccgtttgtggtaaatgagtaatacagaatacttgatttgtcttggaaagagctaagattttttcagctaccttcaatgctatatctccacttataccgacatcgatttcatcgaatacaagtgttttgtgattatctgtacggaatacggattttagtgccagtgcaatgcgagccaattcaccaccagatgcaactttatgtaatggtagcaactgttcgcctttattagcggtaaataataattcaattgatttaacgcctaatggtaaaagttcttcactttcatctatgaaaaaacgaatatcccctttttccatacctaaatcaacaatttcagctcgtagttgtttagcaattacatctgcattttcacgacgtatagaaattaatgctgctaaagctgtttttgcaaccttttctttttccactaattgttgttctaaagcaccttgttcacaaacttcggattctaattcctctaagcgttgttgcgccttttcttcataatttaatatatcttggactgtttcgccgtacttctttttaagaccatagattacagagtctctatcttggcagtatgcatagcgttcttcgtcataactaatagaatctcggtatcgatcaagagattgagcagcctcttctaattgaaagtatgcggaattaacgagttcagagatttctttaacctcatcatcatattttacaagatcatttacttctaccttgatagcattaactgtatctaataatggatgcctgcctccataaaaagcatcataacatgaaccaagtaccttatcgatatgatcgaagctatctaaacgtttcagttcttcagcaatagattcatcctcgcctatttgtaatccagcctcttctatttcatcgatttgaaaacgaagcatatcaagttcacgggctcgttcagccatgtgctcagataaattatctagcgcttgcttggcctctttatattctttataggctgctttatattctttataagccttactaccagcctggttataaccatctaaatactcatgatgtgaatcaggatttaataatttttgattgctgtattgaccatgaatatcggctaataatagaccaatctctttaagcgcctttagaggaatgggttgatcattagccaatataatagatttaccagatgtattaaaggacctagatagaattagttgattgtcctctaccaatatattttttgattgtaataaatctaataaactttggtgattggcaatatcgaatatgccatctataacaaaactatctttaccatgacgaataaactcgctgctagcgcgttctcctaatagaatactgaaagcatccattaatatggatttacctgccccagtttcgccggtaaagatagttatgccatctttaaatgaaatattcatttgctcaatcaacgcaaaatttcgaatgctcatttgcgtcaacatataattactaatccttcattaaatcttgaattctagaaagaattgcaggtacctcagcctcggagcgcgcgataagtaaaattgtatcatctcctgcgagtgtaccaattaattcagaccattttgcatgatcaatagaaaatgctacagattgagcagagccaggaatcgtatgtagcacgacctgatttaagctatgatcaaccttgatcaaggaatcttggaataaacggttaatacgactacgtgataatactacattttcttctggagataatgcgtatcgataatgtccatcgccagttggtattttaattaacattaattctttgatgtcacgagagacagtagcctgtgttacttctatgccttcttgtaataaagccgctgctaactcctcttgtgtttcaatcgccttagactgaacaatttccttaattttgttatagcgatagcgtttcattttttgctccctttttaaacttgcacataaaagagaatagtatctttcttacattattataccatatattcaaaattaatatatggtatattccgtatataccatacgtgttatgcatattgtactaataattaataattagttaatttatggagttttcaactcttataaacacacataatatatggttcatctatttatagcgaatttatgattaacaatttttacaggtgtgttgcataaataaaaggccctttaatgggtcttttatttcgtattatgcatttttagtatagtaaaagtatagattatttactataagtataagatggctgttatgggaattatcgtttttgaattaaatataattcaggtggattgttagcttgatttataggatgccaatggcatacattatactttgcttgatctaactgtgagatatacttatgcaatgcttctttctcttccataccctcaggtgtgccaggatatgctacgatagtaatgattccatccttagcgagtttaggaaatgcattgtttagagcttcaatcgtattatgagggcgtgttatgatgctatgatctccaccgggtaaataccctaaattaaatataattaaatcaatggtattttctttgatttcttgatgaagtgcaatgtcgtgagaattgtgtaaaaatgtaattgttacatttgactgcaatttcttggatgctagtaattccctgctagcactgacagcctgttcttgaatgtctatgccatataaatgacactcagattgagctcgttctgctaaatacagtaaatcgtggccattgccacatgttgcatccactacaacagaggcagatttcataatgcgatcccaaataagatgttgaaattgaactgcattgttgatattaatcatatgcgttcacactccttataataactcgtccctacgagatgctaattttttaaataatgtgccaaagaagcattgatctttaaatcgaacaaataaacaatacacaggattcgatgaaatatgtaaagcttctttattagtaaatgaatagtcaaatgtaccatctatgcatatatgcagttgaggttcacgatcaggcattgtaatttgaatggtatcatgttcttctaagaccatagagataccttgaattaaatgtggcgcaactggagttataataatagaacgattatctggcttcataataggaccaccagcggataaattatatcctgtagaccctgtagctgatgaaataatcagtccatcagaaggatacatctgcgtatgttgtccatttacagctaaattgatacgcgccattttagctggttcagaacgtgtaataacgacttcattaataattgggactaagtcttctcttgttccgtcttccctatctatataggcatgaagatgtcctcgtttttcaattgtatagtcaccttgagcaatgcgtttaatatgactttgtaattgatggacttcaatttgatttaagaaaccaagttctcctaagttaataccacatacaggtatattataagagaaaatttgacgtgctaaatggataatggtgccatcgccaccaaaactaaatgctacatcaatatgtttaaaaatctctggtctaggaagtacattttcctttggtatttgtaataccttgtaagtatcaggtctttcaagatcatctggtaaatatacttctatttgctcttctctacagatatgagctgccattttaagaacggccatgattgtacttttacccatattagggaaaaaaccaatacgcatatatctatctcctatagcatgtgagcctcatctacaactgctgtaattaattcatcagttatagataatgcaccttcttcagatttagtaaaatatcctaaaaactcaatattgccttccgtccctttaattggtgagaaggttaatccgtgtaaatataatttgcaatcgtaagcaacctgtaatatacgtgaaagtacctcttcatgtactgctctctctcgaacaatacctccctttccgaccttttctttaccggcttcaaactgaggcttgatgagagctactaatgaacctgtattttttaatagtgtagtagctacaggtaataccttatcgagagatataaaagctacatcaatagatatgaaatctacaagttcacccaattgttctgcagtaaccgcacgtatattttgcttctccatattgattacgcgttcatcttggcgaagtttccaagctagttggttatatcctacatctattgcaaacaccctggatgcaccattttgcaatgcacaatctgtaaatccacccgtgctagctccaatatcaatcatgactgcatcggttaaatcaatgggatatatttgaatagctttttctaattttaagcctccacgacttacatatggtaaggtattacctttcactgtgagatttgcatctacaggaacctttgtaccagctttatcgattcgtgttgtatccataaagatttgaccagccataatagcggcttttgctttttcgcgactttcaaataaacctcggttaacaaggagaatatctaaacgttctttattactcatatgacaccattatacacatagaaatattgaatataagctattagaatacctaatactaaaccaccaaatacttcaactggcgtatgacctagtaattcttttaatgcaatttctcggtcttttaaaataacaggaatatttcgtttactaaaatactccacaatttggtttaatatttgtgcttgtcgaccagcttgacgacgtacaccagacgcatcatacatgactacaatagaaaatactaatgctaccacaaatatatcagtaataccattatttttaaagtacaaagcggcagtagtagaaattacaaaggatgtatgtgaactaggaaatcctccggaacctactaaacgttcaaaacgcaatgtacgataacggacaagttgccataagaatttaatggcttgtgctgaaaaccagccccaaaatgcggcttgcgctatataattatgacaaatttcctctaaaatatggtacatataactttatcctctaatgtttaatgtgtacgatccaataaataatcaataatagcacttagtatatgtgtatcatcatctattgttgctaaagcagcatgtgccttttgtgcgactacatgtgcttcattacgtgcctcgtcaagccctaacaatgaaacataagtggatttatcttgtcgtatatcactaccaggtgttttgcctaactcttcaatggttcccgttacatcaagaatatcatctgtaatctggaatagcaaaccaagacaattggcatatgtcatataggcggcatattttgcttggtcagcattagataagatgagccctaactcaatggccgcattaaataaagcacctgtttttccactatgtaaaacttttaattcctcaagagggatatgttttccttcggatagtaaatcaaaagcttgtccgccaaccatgccttcaggaccagctgcggtcgctaaacattggatagccttgattttttgctcagctgatgcggttgtatttttactacaaagttgaaatgcataggtcaataaaccatctcctgcaagaatggccataccgtctccatataccttatggttggttaaattacctcggcgataatcatcattatccatagctggtaaatcatcatgaatcagtgagtatgtatgaatacattccaatgcacataggaactctttatataatgatgcatcaaccttcattgcatctaaaacagctttggttaaaataggacgaattcgttttcccccttgtaataaactatagttcatagattcatataaacgtttatattctggtataggggaatttaatacggcacttaaccagtgttcaatcgattgtttgctagtttctaaatatgtctttaacatagcttattactctccgatgcgtacctcttcgataatctgttgaatttcaccttctacagaatccagcatatctgcacattccttgactaaggttaagccttttttatattgatttaacagctctgacatagataattcaccatcgtcgagttgacgaacgatatcttcaagagctttatattttttttcataacttttcagtgatgttgccatcctgtaatacctcctctacaactgcttttatagaaccatcatgcaatgtaattttaaatacatctcctttggccatattttgaattgaacttatggtatgaccctctttttctattttggaatagcctttcaccattaaatggattggattttgtagtgataattcctgtgttataagtgaaagtttatgcttttcatattgccatcgttgtgacgctaaagtttgtaatttctccttataggattgtaagaggaaattttgtttatgcagtaattgtaatgcaggaaacccgaggcgacgattaaaaattgtacttaattcaatacgtttttgctgtaatgtttgatccattacatactgtaaataatcaagtttttgttgtaaatgctgttgtagtgtagtcaatggaagcactgcaatttctgcggcatgactaggtgtagcaccacgcatatcagcagcgtaatcagctaatgtataatctgtttcatgacctactgcagaaataataggtgtagatgcattgtaaatagcttcgataacaactctatcattaaagcaccataaatcctccattgaaccgccgccgcgaccgacgataatgacatcaacatctggatctttatctgcagcttcaattcctttagctatgattggacccgctgttgttccctgaactggtacagagaataatttaaattgcataagcggatttctatgttcactaatatgtaatatatcgtgtaaaacagcacctgtagaggatgtgacaataccgatacaacttgatagaactggtattggttgtttatgagcatcatcaaaatagcccaatgcggataattctctttgtagcgcatcgaattcaagctgtaatgggcttttagaaccaacctgcatatccgatgcgataagatttaaacggcccattttgttatagaaattaacggatgccttgattgttactaataatccattttggaatgcattagcgagtcctttactttgaatcgtactagaccacatcgttacatctatagatgattcctcatcctttaaggaaaaatacacatgaccactactatgacgcttagcatttgttatggtaccactaacatagacattttttaggagatactctctatctattgttcgttttattaagttatttaattgggtaatactcaatacattcacgatatacctacttttgtgttgctaaaaatgccccataagcgtttcccgtagcattgtcgacggagaatttaggatttgcaaaatgaacagttacgttattcttatgacaaaaaccatttagacgattgcgtagtatagaattactcattacaccaccaacggcaattaatgttgatactggtgtatgtttgagatgataggttaataatttttccagagaatttcctatacaactaaatagtgccttactcatagatgcaggtgacgcccctttttcgatattacgcagtgcagcactacaaggaccagcaaagctaatccatccttctttaacagaggaaggtagcggatcatacgtatctgtttgtgaagcaagtagttctaattctttgccacaaggaaattgaatacctaatgcaacacctacacgatcgacaaattgtccgccttgtagatccttagaaccaccgataatagagctttcaaaaatccccttacctttatattctgttaaaacgagttctgtagtaccaccagaaagatgtaagctatagaatggaaacgtagggacatgtccaacttcccttagggctgctaaaatatgattttcttgatgagcaaatttatacattggtacttgcatcatatgacttagtgatctagcaaaaccatgaccaacaagaaaggccggcatataagaatcatcagagcgtctaggaaaagcactaacaccaatacccgataatggaacttgaggtaattcttcgataagacgaggcaatacctttgtatgttgaaacaccatgttagattgttgaagtcccttcattcctggctttacatctaatatttttcgagcttctcctactatatttagttcatcatcaataatggcacagctcgtcgtataacagcttgtgtcaattcctagaaaatattgtttcattatttactcttattataagcatctagaatcgcattgattaatttataggatgcatcagaaccaaaggattttgctaattgtacagcctcattgataacaatagatggagatacatcttcactattgtagttgagctcccaaatcgcaagacgtaaaatggcgcggtctactttatccataagtacaaatttccgttttgtgcaatatggttcaagtattgtgtcgatttcttcaagatgagataacacaccatctattatttggtttgcataagcaatatccatagacaacgagatttctccgtctgggaaaatcacatcatcattagaggtatgaaattcattagcgtatagaacttggaatgcatattgacgtgcttcacgtctatttctttttttagacatattgtctccttattctttgataattccttcaatatgtacatcaacctttacgtgatcaaggtcaagcgtattctttagtgtttgtttaatttcagactgcaattgttttgctatatctattacattgtatccgtatagacaacggatatacacattaatttcgataaagccttttctatgctttacattaatgcctggtaaatttttttgtccaaaagcgttcgttataccatcaacaatttcatcatataagcgtggacttaaagaatgaataccaggaattgtacttaagggcttaatagcaacatcaatgatgacggaatctgcaatatctactgttgctgtatctaagccatagtttaatttatcgtcttgactcataggccctcctattattcattacgctgaattggttcaggtgtaaaatcatcaaaaataatatcttggactacgatgtcaattgtttcaacttctatttcagtgtaattgacgagtgcagttttaatccgctcttgtaagcgcagtgcaatatcaggtatgcgatacccataggagatacttacatataatgtaactgaaattgctccgtcatcgttaaaggaaatctttacaccttcatgggcatttttacgtccaaaaaaggtattaaccccatcattaaaggtagaactcatatgatggattcctttagtatccaatgcggtcatactaataatagtagcatatacattgtctgcgattttaattttaccagtttctaactcagtatttttcttagtcatataggcctctttcaaaaaagagcacctgtccctatataatgacatagacgacaagtgctcagcttaacaaagatatatgggggactatattacatttaaaagatctggcccactatatcaatgaaatagttttaggcacgttcgatgtattgaccagtacgagtatcaatacgaagtacatcatctacttcgataaagagaggtacttttacagtgtagcctgtttccaatacagctggtttattaccacctgttgcagtatcgccacggataccaggatcagtttcaactacgcgaagttctacagctacaggtaagtcaataccgattacaataccttggaagaacatgatggatacttccatgttttcaagaaggaagtttttagcatcacctagttgttcaacattcaattccacttgatcatatgtttcgttgtccatgaatgtgtatgcgccatcagcttcgtataagtattgcatacgacgacggtcaacatgtgcttttggcactttttcaccagcgttgaaagtacgttctactacggaaccagtttgcaagtttttcatttttgtacgcacgaatgcagcacctttacctggtttaacgtgttggaaatcaactacttgccatacattaccgtcgatctcaacggttacacctgggcggaaatcattactggaaatcatctaactcttctccttctaaatacctatttcgattaactcttttggactatgtgttaataattcacagccatcagctttaacaataacactatcctctattctcaatccgatttcaccagaaagataaatacctggttctaccgtaatgatcatattttcggaaaataccgtatcggactttgcattggctactggttcttcgtggatttctagacccacaccatgtcccgtaccatgattaaactccttggtatatcctcgttctcgtatatagtcacgacatactgcgtcaagttctttgcctgtaattcctgcacgaactgctgcaacacctcgtttttgagcttctaaaactatactatacaaattcttttgttgctctgatgcggggcccataacgacagttcgagtcatatctgaatgaaaccctttatacacggcgccaaaatcaaaggtgataaaatcaccggcatctataatcttatcactagccacaccatgaggcatactagagcgattaccggatgctacaattgttgcaaaagaaggttcctctgaacctcgttttaacatttctgattcgagtatgatacgcgcgtcattctccgtcatacccacctttaattgcggtaataatgctgcaaatgcatcgtctccaattttagcagctttacgcattaattctaattcatcttctcgttttacagcacgtaattttgcaaaattgatagatgtaaaattaaagcgttcatctaaagtatcacataaggtttcatatgtatcaacaggcatatattttccttcgataccaaagagaccatcgtggatgtgattgtcattaaaaatatctacaagagtatccataactgatgtttcatattgaataacctcatagccttcacattgttttgtagcttgctctgtatatctaaaatcggtaatcatgaaagctttatcttgtgtgacaatagcaaatcctgtggtacctgtaaaaccagcaaaataatgtaaatttatagggtcaattaaaacgacaccagttaattcttgttctttaatatacttttgtagctgatttaatccgttcataatcatgctcctagtctataaagtacaccttataataccataaaatgcctatattgaatagattttcatgctattttttaaagtctactacatcttggtcatctatttctgaatatgtattaatagcctcaatgccatttaatgtaatatgacctatggacaatctttttaaataagtaacttcgcctccagcggccccaatcatacgtttaacttgatggtacttgccttcttcaatggttatatgtagagactgttcagaaagaacgtctatattagccggtttacattgggttccatcccctaatactattcctgtttctatacgttcaagaccatcttttgtgagtttaccattaaattccacatagtataccttcggtacatgtttgtgtccattaatgatagaatgcgcccaaataccatcgtttgtgagtaataatagaccttctgtatctttatctaggcgtcccacaggaaatacacccattttcttaaactcaggtggtaataaatccatcactacaggatgcgtaggatcttctacagccgtaatatatccagcaggtttatgaaatttaatataatactgttgttttgttgatatttgtacgccatcaactgcaatgatatcatcatctatatgtatagattggtctttttttaagataacagcaccatttacagtaacacgtccatcccttataatttggtgaacctctttgcgactaccaaaggctttattggctaatagtttatctaatcgcatcttaattcctctttcatagcatttgaaagaatcaattatacatgccctcttaagttatctacgtgagcagtatcatttaataagtttaaaatattatggtcagatggtcccataccattgtaaaatatgcgattaattgctgtattaccttggctgaaattccaacagtgaccaatgggaatatcaagcattttacataaaagtgtacgaatcgtcccaccatgacaagttattaaaattgtttcgtcatcatcattttggcttataaattctgaaaggccattccatgcacgattttgtacttcttgaaagctttctccatttggcagcttgacaatatcaggttgtcgatacatttgatcaataaggcctggccatcgttcttcgatttctgagaacaataatttttcccagtcaccaaaatcaatctctcgcaaccgagaatctactgtaatatcgatatttcgattaccacgaatcgtttctgctgttacgagggctctagataggtcacttgataaaatacgatcaaaatgtacattcttcaatgcatgagcgcaagcttttgcctgtgctattccattgtcattcaaaggaacatcggttatgccttgatagcgacctatcttattccattctgtttcgccatgtctaataatatataatgttttcatgttgtgttcctatttctcaaatatggtacttaataaatgaataagttccacgttgtgtgcatgatcttttatagcaatccgcatccattttggacctaaccctttataattagcacagctacgaattaatagattatgtttttctaatctagtttgtacatctgtaactgaaatatcaggatcattaatttccattaagatataatttgcagatggcttatagactactaaatctttaatagcagataatgattcatacatatactttgcttcattagccaataccatcttactatcgttaatatacttagtatcggttagtgcggattcagtataagcttgtgccaatgtatttacagaccatgcaggaatatattgacgcaattcttgtattaatgttggattggcaaacactgcaccaatacgaagtcctggtacagcataaaattttgtaaaagaatgtacgataattacattgtcatattgattaatgagctcgcgcatagagtggctattgtctcgtaacgattcattaccaataaaatcaatgaacgattcatcgataacaagtaagctattagcatcttttaacatttgtgctaatactttgattgattgtttatccaacaatgttccatctggattattagggttacctaaaaatacgataatgcgtccatcttgaccttttaattcagcagcaaatgtttgtaatgctaaataaggtacttcaaaatatggggtgccatcatcattttgtcgctgccgataaaaaatttcccttaccggtatgttcgcagcatccatagaggcttggtattcagagaagccaggcgcaggaacaaaagcccctgtaaatccagataatcgtccaactgcatagaggagctctgcagctccgttaccaagaagtatagaatctttttctataccatatacatcggcaatagtattcataacatcatcatttgtaacatctggataatgagatatatatcgcaatcgttcgtttagtgcttctaaaccttttggactaggtcctaatagattaatattggcactaaaatcagttacttcagatagatttattttgtggtcatgagaaaatttaaagatatttccgccatgtgtatctggcataggagatcctcctttatcgttttatatatgttagtccttcatttgttgtttccacaatatcaatatattgtaaggtaggtaattttttttcgatgtatcgcttacattcatcgatagccgtataatcacttggaaataatagacccattattgtaccactgtgagcaatgattgtaccaacgctatgaaaagcattaccaatgtcatgaaattcatataaatttggtttatataaaatacgttgattagcaaaggcactcaatgtagcggcctgtcctatcaacgtaatatcatgtgtttctagaccttttttgaagagctctagtgattctctaatgataggctctttctcctgtattttatggaataaatctttttgctgattaaaagagatggtatcaatagtaccaccttcatcaaaaattagtatttttaaaggcggacacgttcctaaaaaattacagatggacccatttatataatcaaattgtgtaataccaggataaaaagcagcatccgtcggctctactgataaacagatggtttctagctcttttggtgttaatgctctattacatgataaagcagtggccattgcggctactgctatatccgcagagctagatgccattccttttccttgaagaatatctgatcttatatagatagcagtattgtcacagctgggaatatgtaaaatatcctttactaagttgcgagcttgactagacttaggttgtaaggagcaataatagtgtggcaatggatgtgttacctggctcagtgcataggaatagcggttgattggacatgtcacaagaaatgattgtccatcaatggccccttggataaattccccacaagtgcctggcgcacgaacataataagtcactaaatcctccttacacaataaaacaatctatgtataattaaataattaaagaataggagctttcacaacagaagataataatgtcaacgtaattatatatactaatatcaacaagacctctgttacttcaacaacgaagccatatgtatcaccagtagttccaccaagttgtttaacaatatagtgattgataatacgattaatgatatagctcacgatcattgagaaaatattaatttccattaatccaaccaaagcatatgctaaaccaaagagagctatactatatggtataaatggaatcgaaagcatacttgttatacctaaagcgattgcatatagtaatgataaaagtaaacaaataataataggcatacagaaagtagaaatcgtgctccatgtaatgacatgttttggtgcatatactgcaaaggcctgccccatacccgattttcgagcatatggataagagcgaatacttaaaatcaatgtgtatctactcatgagaggcatcattacaagtataataggtataaattcaggtataggaattgcagttaacagttgccattttaacaatgtgataaatacaaaagctacaaccccaaaggaaccaacacggctatccttcattatttctagttttttctctctttcacggccagaaaaaagtccatcacttgtatccattaatccatcagcatgtaagccaccggtgaacaaaaattcactgataacgataataagcattaaaggcataggtgacaaaaattgagagaatataaaataaattagggttaaaaatataccgatgatcaatcctacaaaaggaaatgtagcaacagacttaccaaaatcttccatggaccattctgtttgatttactatttttagtctagttagaaattgtaaagctataaagaaaggtgtcatctatgtattactccataaattgataagcgactatggtggtgatgattatcataagtattgttgacaaatacatcatatatatacatcgagtaatatgtagtcgatttagtgtttctaatgcatcacccatatattcacgaaatgtcatctttttaaagtactggttatagccgcctaggcgaatgtgcaatgcccctgctacaggcgcttctgcatagccaccattagggctaggatgtttataggcatcgcgaagaccaatacgaaatgcggatttgccatcaaatcgtaatataaaggcagaaataactaataataggaatgttagtcgtgctggaatccaatttaatatatcatctaaacgcgcagctacacggccaaagaacatatatttttggttcttatatcccaacatggaatccatagtattagctgtgcgatataatatagctcctataggaccacctagtataaagaaaaatagtggtgaaattatgccatcaatagtattttctgctatcgtttctactgtggcccgagtgatttcactttcatcaaggtcttctgtatcgcgccctacaatccatgaaacgcgatgtcttgcatcatcgatacgaccttgtttaagcaatctattaacttcaaatccagccgcacctaatgaacgaggtgagattgtaatgtacacgatgagaacttgaataaaatattctacccattcattaatgagactaccaatccatagaatcaatgaggctatgatataaatggttaacaatataaatccaactgcaataccaccataccaaagtttttttgtatcattatctgtatctttataaaatacagcctcataaaatgatatgacacgaccaattagggcaacaggatgaaacttactattgggatccccaataatcgtatcaataataaatgccaaaattggaatacacacatagttgtagtgtttaaaccactctaagagaatgtttaaatccattaatatcacccattatcctttaatagagtcataatgtaatccatatccaaatgttcttctacaatgtctgctaaacgattatacgcattgtttttatgttcgaaataatggaaaacaacaggcgtttcatctaatcctttacgtaaacgcaattgatttataataaaacgacggaattcatcattatcaaagacaccatgaatgtaggtacccataacttgatgacgaccatcgataaagccatctacgaccgttataggaatttcactacgtttagtaatggtaaaacaacgttttacagtatcatcatttggtgttgtatcccccatatgaatttcatagcctacgagttcactaccagaaaatgtaccgttaaggaaatgtaaattctcaacatcaaatgtgacttgatgtgtcgttttttgatccttcatggttgtagtagagttaactaaaccgagaccttcactctcctcaatatccccttccatgtgatgcggatcatatatagcagtaccaagcatttggttaccaccgcaaataccgattacaggagttcctttttccgcgagctttttaatctcattagctaagccggagttttttaaatatgttaagtcagccaatgtatttttagaacctggtaaaataatcaaatcaggtgtaccaataacatctccagaaccgacaaaacgaacggatacatctggttcatagttcaatgcatcaaagtctgtaaaattagagattttaggtgtttggattacagcaatttgaatgtctttagaacctacattctttttattttccaaagctacagaatcttcttcatcaatatcaaggttttctatggcaggaataacaccaactacttttttacctgttttttcttcgatgaaagtcaatgctggttctaataacttaatatcgccacggaatttattaattacgattccctttattaaatcgcgttcttctggttcgagtaattctaatgtgcccacaatagaagcaatagcaccacctctatctatatcggcaatgagaaatacaggcgcttgtgtcattttagcaatacgcatgtttacgatatcattagcttttaaattaacctcagcaggactaccagccccttcgataacaatcatttcaaaattttcatcgagaaaggcaagagattctttgaccttatcaagagctgttaaggagtaatgggtatgatattctttagcactatacacaccaacgggtttacccattaatacgacttgagatgactgatttcctgtaggtttaagcaatacagggttcatttgtacaataggatcaataccagctgcttcagcttgggctacttgagcacggcctatttcatcaccccatttggttacataggagtttaaagccatattttgtgctttaaatggcacagttttatagcccattcgataaagaatgcggcataatgcagtacataaaatacttttgcctacattagagctcgttccttggaacatgatttttttagccatttatatgaacctcctgagattttaattctatggttaccccactaatcgttaaatacattttattggcagcactagcaacctctcgatttacacgaccagttatatcgcggaaatatcttgccaatttattctccggtacaatacctaatccaatttcattggtcacaaaaataacagttttatcattactgttattaatttcctgtaataatagtcgcagctcttctaaaataatagattcaatacgattagaatcttcctgcgtattgatatccccatgagcgaagacgtgatttgatgtaaacattgtaagacaatcaatcaagataacatcacttacattcttaatttgttcccaatttttgtgtaagtgtagtggaatttcaaaagtaatccactctttaccacggcgcatttgatgctttttaatacgatctttcatttcatcatcaaaagcttgccctgtagcaacatatgcctttcgtccttttaaggataaggctaattgttctgcaaattcactttttccactacgagctcctccggagcatagaataattgtagatttcataaaccacctatacaagtatatataatttctgtatcattattagtataacaaaaggagatacactatggaaattatgaatatgaaattaaaaatgatgtctaccctttgggaaaatacctatcgtgtagctattgaagatggtcaaggtggatatattggtacatgtcgtgtagttgtaaatgtaccgctagacccttctgaattacctcctaatgcacctattgtggaaccacaaatgtttgtattagtagaggatttttcttttgatgcatctaaaattataaattttgagacaacattagcagatttattgcgtgaaaaatttagatatcaaattcctcatatcttctttttctatccaagtccacatgatgtattgaatcaagaaattacacaatcttaataaagaaaaaagctatgtgaagacatagctttttttgtttattcttctccgatttcttcttctacacgacttaatatgaagcataaatcagatagtcgatttaagtatcgcaaattagattcatgtacgctttcaccagcgtctaatacacgccataaatcacgttctgcacgacgagcaactgttctagatacatgtaagtaggcagaagatttattctcaccaggtagaataaattctgcaagaggttctaattttgcatcaaaacggtcgataaccttttccaaatgttttacttgttgatctgttatttgtggtgcttgattcaagctagcaatatcagccattaacgtccataaggaacgttctatatcgagtaactcagcttgtactcttacgttctttgcataagctcgagctaatcccaagaaggcttgaagctcatcaatcgtaccataggcttcaacgcgaagagaagatttctttacacgttcacctgtataaagacctgttgtaccttgatcacctgtttttgtataaacactactactcatggccgtacctcctaattagatgttatttatattctgggaaccataaatgaatttcacgtgctgctgaatcaactgaatcagatgcatgtacaacattagaatccatagttaaggcatagtcaccgcgaatactaccaggtgtggcatctacaggattagttgcaccattgatagtacgtacagaagtaacggcatttttaccagctagtacaaaagctagtacaggtccagaagtgataaaatcaaccaattcaccaaagaatggtttgtccttatgctctgcataatgttcttgtgctaattcttttggagtttgaagtaatttcatagctttaatgattaagcctttacgttcataacgtgtaagaatttcaccacagatttgacgttttacaccatctggtttaataagaactaaagtttcttccatctttaaacctcccttttattaaaatctataatgtggatttagagatagttttttcaatctagcaatacgatccttagtactaggatgtgtgctaaaaagattcgacaaactagcaccaatacccatcataggattaattataaacatatgcgctgtagcattattggcattaggtaatgttccatatttagaatattcttcaattttagccaatgctgatgcaagtcctaatggatttttgcttaacatagccccaccctcatccgctaaatattcacgggtacgagaaatactcatttggataatagcagctgctaaaggtgccaaaataaccataccaatcaatgcaagtggattgacattatcatcgcgatcagcagagcggccaccaaagaacataccaaaatgggcaatagtagatatagcgcctccaataatggcagcaatagtactgattagggtatcacgatttttaacatgtgttaattcatgacctaaaacgccagctaattcatcatctgttaataaacgttgaattccggctgttacagctaccgcagcatgttctggattacgaccagttgcaaatgcatttggtacgtccgtagggatgatatatacctttggcatcggtagtttaccgtttttagccaattgttcaaccataccatataatttaggatttgattgagcggtaacttgttgtgcattgtattgtgctaacacaatcttatcgctataccaatacgatgatattgacatgcctgcagatatgatgaacattaacatcattccacgagcgccgccaaaagcatcgcctaataatactagtatcactattaaagtggctagtaacattgttgttttaaaattattcatagaatcctccaacataagtttttggactatgccttaactagatttattataccacattttgaatagttgtggcccctattgtatctgcctctaacacatataccttgttttcgatgccatggaactcaaagatttgtcccattgcttcagctactgtttgtacatgagctttatctgtatatgcaattaaggtagaaccagatccactgatagttgcaccataagcgcctgcggcttttgctgcagagaataccttatcacaatgaggaatcaacgttttccgatacggtacatggagattatcctccagtgcaactgcaagattatccaattggttcgtaattaaactagttacgaataacgatgcatgactcacattttgaacggcctctttaaaaggcacatgatttggcaatacggatcgtgcatattctgtggaaaccaatacctctggcacaacaacggcaaaatgtagtgactctggtacagggataactgtattcaacactttatcttttaggcctgtagcacaacaaagattaccaaaaatggctggtgccacattatctggatggccttccatacgattggcaatgatgagtaactcttcttttgaaagtggtttatttacgagattatttgctagtaaaagcccacctacaatagcggtactactactaccaaggccacgtgatggcggaattaatgtttccgaagtaatatgaccatattgtattggttcttgtgctttagcaaatacttgttcaatagctattccgatgagattttttttaggatcttctttttctaataaatcagcgccatacccatgaaatgtatagctaaaagatgtagcatttgcatcaggtgtaaattcaaaaatattatatagatttaatgctagtccaaggcaatcaaaacctggtccgcaattggcacttgtagcaggcacttgtacacgaattgttgtcataatattacgcttccataattctgattacactacatacatctttcacagatcgcaagctgttaaaagaatcaattaaatttaaaatataggaatgtggacatttagaagtcacaatagcaagtactgctgtttcaggatctttatttcgttgaacgattgaaagaacagagattttttgctctgctaattttgtagcaatctttgcaagaacaccagttttattatcaacagctaaccgcatatagtaactggattgtattttacctggggaataaatattcttttggtcaaagtagaatggtttaaaacgtcctgtagattcaaaagctacgtttttagctacttccataatatcgctaacaacggagctgcctgttggtaaactaccggcgccacgtccatagaacatggcatcatcaatgccattacccttgatataaattgcattgtacgagccgcgtacagatgcaagtggatgtgttaatggtacgaaagcagggtatacattgagagataaaccctttgacgattcttttgcaatgccaataagtttaatattgtatccgaattccttaccaaaggaaatatcttctgtatcaattttagtaataccttctacagttacatcctcgaagaatatacgacggttaaagctaatggatgctaaaatagcaagtttacgagctgcatctaaaccttctacatcggcagttggatcagcttctgcatagcctaaatcttgagcctcttttaatacatccccgtagcttaatccttcatctgtcattttagataaaataaagtttgtagtaccattcatgataccaacaagttcagtaatgcgattaccgccaagggaatcgtataatgttctaataattggaatgccacctaatacagaggcttcaaaacgtaaatctacgtggtttttatacgctaagtcaaataaatatgggcctgcttctgctaataaatccttattggctgtaacaacactttttccatgttttaaagctgcttcaacacaatctttcgcaaatgttgtgccccccattaattcaacgacaatagcaatcgattcatcattaagaacatcatcaatgttagtcacgtattgtgcagtgcttggtagtgtaatatttgtgtatttatctgggctgcgaacaaatatttttgaaatctcgatagttacaccgcttctgttagtaatcaaatcgacattatcttgtaataaattaaaagttccttgggaaacagtaccaaatcctaataaggctattttaacggtcttcataatggtcctactctcttctgactggtcaatataatatttatattatgcttgacctaaaatttctactttaataattcctttcatattgcgaatatcatgtaataattcctctaaggaaccttgcaagtttttggtttcgaaagaaatactactattagcaataccctgtaatggaatatcttgatttatggtcaagatacttccgtttttatcggctattgcttttaaaacacttgataacatacctgattcattggacattgaaacggtaatgctaacaatttttccttgagcaatctcaaaaaatggaaatacataatctttatatttataataagcagatcgacttaaatccattttctcaacagcttcatttatggtttttacttcacctagtttcaaaatctcttttactttaatcgttttcttaatcgcttctggtaaaatatcttcttgaactaaataaaatttgtcctttttcggttttgtcatactaattctccttacattaattagatgtttcctgagcaacaaactgacgtccatataaagttaatactgcatacatacctataaaaaatggtacatattctgccatcacacgccacgccacagctataatacctacagtgccactcggtacgaatggtgcaaaaagtaaaatgaataatccttcagcaatacctgttccccctggagtgggtgcaaaataaagtattaaatttaacaatatcattctatctaatatcgtaataattggtacatcattagtaaaagcaaacatcaatgccggtgctatacagtataagcataataaacttaatcctgattcgataaatacaataaaggattgagtaggttttttatacaataatgcaagcccttgatttagtgtttctaatttcgccaaccaatctttagtcttatgggccttaaaacgttgtgctaaattatatacgaatttcctcatatataccgtttgtaaaagatatgttcctaataaggtagccaatacggcaaaaaaagaaaatagtaataacatatctcttgaaatatatggtatttctatggagtcatataaaaacacaatcggtaacatgacgactaaaaacatgattgaaaaaaccgtacgtatcaatacgattggagttcccttacttatcgggacatcatagcttcttaatacgagtacttgagccacagctccaccactggcacctggtgtgagcatagccataaaatagttgctaaatataacccgaagtacagcttttattgataaatgataaccgccaattttaacaaggcgctgcaatcttaatccatcaaaatacatccctaaagcaagtgcaataatggcaagcaacaaagattcaccattaaaagttgttattgtttttagggcttctaaatcgatagtataataaatgattcctaaagatacggcaaaaagtaggacaaacataaatatgccgcgtctcatcatcttactcataacaaatccccataattaatgagttctatattatgttgtgaaatatatctacgtacattttcggatgtcatagcagataattcatcttgccaatgataaccccaattatattgatttcttaaaatttcatcactaatgcctggatgcgtcataatttcatgggccccagatagagagctaacttgttttaaaatcgataataattctgtttctcctaaagcaccaccattaatcatgccccagaagtattgtgtaaagtaaatccccttgtcgcgaatgctaggcaatgcttgagcagccacggtgctcaaaccacatttccccataatacgaacaagattatgcacgccatttaaaaatgttattttttcatttggcacccgtatagctttaattttatatcgcatagcctgttctaaaactataggtagaatactaggtaatacatgcatatgttggtgtccatcaatatgagttacgtttacaccagattccataattttagaaacttgctttgtaatctctgttctcacttcatcataattaatagagccactatatatgcgcttcataaactctatataattatcaacaaaaacaccttcgtttgttacaagactaggaatttcactaggatcacttacaggagcgattcctcccaccaaagcaatgtgaatacctatacccaactttggatattcctttgccatatctactgcttcattaaaagcagcaccacttgccaatatagatgtgcttgtaatagcacctttagtatgccctacgataataccttcatttatagctgaatgaaggccaaaatcgtcagcatttataattaattttgacatatgcgtgcctctttattcgtaaaaacggaaaaacaatgttcactcagaaaagatatatgttattttaacaaatacaggtatataaaatcaatacaaaatagtaatacttgtatactggaaacggactttttatatcgttttcacataatttatatacccttctatcatagataatcatattttatactactatagaaaattatataccctgtcatcaaaaatgatcgatgacagggtatcgttataatatatattaaatttgttctcttactttatacatacatagggcggccgcaattgatacgtttaaagattctatatcaccatacatgggaattgtaatagcctgatcacacatttcaataatttctctagacactccatttccttcattaccgagtataatcatggttcgtttaggatatgaaatggtatgataaggttttgcattttctagtgaggtaacataggtttttatcgtattatcctttatgaaatcataaaattcagataatgtgacatcttcaaaaatcggaatattacaaagcgcactcatcgtactacgtacgcatttttcgttataaggatctacggttccttttaacaagaatataccttttgcaccagcagccaccgctgtacgaattatggtacctaagtttcccggatcctgtacaccatctagtgcgacatataatccatcctctactatcaatgaatgcaaatcattaacacattttttcgctatacctagtataccctgtccgtttacagagtgctcaattttatcaaatattggatcttgtactacatagacggaagaaacagtaaaacctttttgcactagcggttccaattcacttcgctttgattctctaattaaaatagagcgcaaaaagtctttttttcctatatccgttacagcacgaattccttccaccgtatattcaccaaatttttgccgatattttcgctgttgtaaactgataatatgttttatagtcttattgtctttcgattgaatataatctatttttggtgattccataactcgtaaaaatcccccttatgttgcataagctcatcaaatgttccatcttccacaatcttaccataagaaagaactagaattctatttgctttttgtacagttgataaacgatgtgctacatttataattgttttttcaccacgtatagtttcaatactttcttgaatttgtgattccgtatgactatcgatatttgccgttgcttcatcaagcaataaaatcggtctatttaaaatcaacgttcttgcaaaggctaataattgcttttggccatctgataatagcgatcccaaatatcctactgatgtttgatatccatctggcaaagattcaatcatatcgtgtaatttgacctttttagtagcgtctataatagtgtccatagagatagaggaatcatataaattaagattatcttgaatcgcacctttaaataagtatgcattttgaaatacatagcccataatatttctaatcattgaagaatcatattggctaatatcatgaccattaatataaatgttgccttttgtagggcgcaatatgcccatcaataatgaaagtaatgttgattttccactaccagatagtcctacaataccaagatactcccctttttttactgtaaaagaaatgttattcaaagcatatacatcactgttatcataggagtaatacacatcttttaattcaatggtatcaatcgttttaaattcattgggaacagttgttatcaactcacgctttggttcatctaaaataggaatcaatcgttctgcaccggccaatgcactttgcaaggaattatatttatcagcaatttctttcataggttgaaagaatcgatccatatattgtataaatgcaaataccgtgcctgcatctgctacggattctaatagatttgtcattgtaaaaataacaataagtgctacaaagaacaaaccatctacgagaggtctaaaaatagaaaatgttgtgacctcaaatataccggcttttaaaaactcacgattaacagaatcgtaccgttgttcaatacttctttcacctaaataagtttttacaattaatatgtaattcaacaattctttgatgctcgaattagatgctgctacagaagagcgaacttgtctaaaagcttttctggaaaatttttgatacacccagataataaaccccattataggaatcaacaaggtcataacaattgctaagggcacattaatagcatacataaaagctaatatgcccaaaatcatcaatgcactgcttatgagttttagcaatacatctgtatataatgtacgcaatgattctacgtcattggtaatacgggtcacccaattacctataggcaaagactgaaaatcttcggcggatttatgaagaattttttcaaataccgtactgcgtatatgaaaaataattttctgcccaaatgtagataataaatagttttgtaagagaataaagacaacgctgccaactatagttaatgcatatagtccagcataatgctgaatagtattcaaatctttcatagcaaagcctaaatcgatagcttgtttagaaagatatggacgtataagcgagcataatagattactaataagggctatactagccaaaatgagtagccataaataaggcctaatatattttgttaaatatgtaaataggcgccaatcattatactttagtttcattattgggcctccttattttgagctgtatacatctgaaaatataaaccgtttttacacattaactcatcatgtgttccaacttcgcaaattctaccttcatcaaatacaatgatacgatccgcatgcttgattacctctagtcgttgagatatacataaaatggttttatcctttgtagattgcaatacttgtaacattttatctacagttatggcatctaaagcagagaagcaattatctaataataagtaaggtgcatttttgtaaaatccacgtgcaatattgatgcgctgtttttgaccacctgataaatcgcgcccttcctctgctaatacgcttaatggattctccaaatcctttcctaagtcacgatataattgagcttttttggctgcttcagcaacggtagtatgatttttattttcataaccgaagctaatattgtcagcaattgttgaacttagtagatatgactgggttggtacataagaaatcgaatttctaacagtaccaatgggcaatgtcgtaatatcttgattattaatataaatagtctttgatggtgctttttgaagccctaataacaatttgaagagtgtacttttaccagagccaggcttacccactatacctacaaactctccttttttgaaggtaatattaatttgacgtaatgcaggtgatttagattcatcataggtaaaatttaaatattttatatcaatatcgcctaaaccaagttgtttaccatcagtgtcattacattctgcaggtagactcataaaatcaataattcgatcaagggaggccatccccttttgaactatggctactaatgaacctaaagaaatcaatgggcctataataagcataataaaagcattgattgtaacgaattcaccgacagtcataaggccttctacggctaaagtaccacatatatacatactaatactgatacatataaatggcgcaatcatagttagaggcgataaaatagcatcaagaacagctacactcatattatcggaatagtttttcttgttaatacgattaaacaatcctcctataatcgattctttattaaaagctcgaataacatccatgccctggaatagttcttgcccaaattctgtcatgtcactatatgtggtttgagcctgacgttgtttctttcgtaaacgccggcctagtgtaaaaattgaacctaaaataaaaataaccggtgtcataatctgtaaggctaaaataaaatctattttttgaattaatatgatagagcccaatatagaatataaaataatatcaacaacgatcataacacctaaacctagggcaacgcgtaatgatgtaacatcatttgtcattaaagccattaccttaccaggtccgttaacatcataatatgtagtaggaatttctaaagcacgagcacataatttttggcggaataaatactccatgcgtcggatagatcctaataatgttctacgtgatataactttcaatacagtaataatgattaataaaccaatgaaataaaatatataaagagttaagccctctttattatgactcaatgtatcgatggcactaccaattaattgtggtacgattaaaaaagctacatcgattgcgattagcatagttaatccgatgagataatatataccttcacgacgaaaaaattccttgaaaattgcatatggattcatcgactacctcctgttttctttctatcgtaccatttactacataattcttctacctaaaacattaaactgaactatatccaaaattaataacaaactatatcgaaaaaattagtttactaaaatggatagaaatggtatactaaccatagaaacattgtttaatctatttagtatacaaactcttaggaggaataaaacatggaaaaacgtactggtgttgtaacatttgcaggtaactctattacattggtaggcccagaaattaaagtaggtcaacaagcacctgatttcacagtattatctaatgatttacaacctaaaactttgaaagattatgaaggtaaagtaaaggtaatttccgtagtaccttctcttgatactggcgtatgtgatgcacaaactcgttggttcaaccaagatgcaacaggtttatctgatgatgttgtagtattgacaatttctatggaccttccatttgctcaaaaacgttggtgcggtgctgcaggcgtagataaagtagaaacattgtctgaccacaaagatgcttctttcggtacaaactatggtttcttaatcgaagaattacgtctattatcccgtggtgttgtagttatcaataaagataacaaagtaacatatgttgaatatgttccagaagtaactcaagctgttaattttgacgcagcattagaagcaattaaagctgatatctaatattgcctacttattaaggtcgtacatcgtacggcctttttctattcatgggagttatgtatgtggattaaattttcaaaactattattaactataaaaaatatcgccctcctcggcgttggtatagccttgtgtatcgctttagttaattcactaattaatttaggtgttattacatgggccaatattaatgatgaaagcacatattacaatcttattgaagaattaattaccttcttcctctatttcgagtttattgcgttaattgtaaagtactttaaaaataactttcactttcctttagactttttcctatatattggtattacggccattgttcgatcagtaattattgcccatgatacagcctttgacatcctcatatgggctatctctatttttgtgctcgtatgtagtttagtattggtaaaaaaatatattggtcacgatgaataatataattatttatgattctataatactcaaaaaggtcctaccgattttcggtaggaccttttttcatatccaaaggattagaaaatgtttttgctgtaattggcgtatttagcttctaattcttccattttgtcattcatttcgatttgtaatgcagatgcagtatcataatcttcagattgtaaagcttctacaatacgtgtgaataaggatttgcgatcatcgctatcttttgcaagatagaaacgtaagtcattaacttctgcaaagcgtttgtcatcaatgctattacggctatctgtgtgaatggaaaccattttacgtactgtatccatattatcaggaatgatacgatgagccaatacgagtttccaacgtttcaaaatggatgcaatgaaggaatccattaagtcatgagcaaatgcatcaccttgtgccaatgtatttacaagttcaggattatttttataacctttaatgttttcccatactgttgcaggcgctacgccgaacatttgattacgttcttcttgagtgtagtcttcgaatacatctttttcagaacggaatgcacgttctttaggtaagtaatctgcatcttgaccagcttctttggaaagttctgcttccaattgtgcttgcgttttaccacttgtaatggcatatttcatgccatcaaatgcagagatgaaaatcaatgctaatgcagtgtatgtatttgtataagggtttggagaacgcaattcataacgtgtagccataggattgtcgatatcgcgaatcaaaccgcaaaggattgtacggttacggctaggttcagaaggatcattacctaaggaagttacgatacaaactggagcttcgaatccaggtttcaaacgattcaaggaatctgttgtagagctgatgaatgggttaatagcttcatagtgtttcaatagacccatgattgcaccaatacctaatgagctagcagattcttttttcatatcttctgggctgaacaagttaacaagtttgccagattttaattttgccattacgccaaagtgagtatgttcaccagaaccagcaacaccgataattggttttgcattgaatgttacatcaagaccattttcacggaatacttcacgaacgataatacgagcttgtaattcgttatctgctgtttgtaatgggttaccagagaatttccagtcgatttccaattgttccaatacaacggattcatgaccatcttcatcaagtttagcttttacaccaccaacttctttatggcccatttcagctaccataccgtatttatcaagacgttctacggcttgttctaatgcagtacgaacagtgccgtgtgtacgttgccagtattgttcttgcaaacgttgagaaacggataattcttttttagtaactgttttagaaggtgtttttacccagaattctaattcagtagcagatgtgaaaacaatatctactacatcatcagctttcacatgaggcataccaggtacacctttttctttgatcaaggataacaattctgcacgaacatagtcacagctgcgtttcaaaatagaacgagaatctacatagcggtaattatgcatcaagaatgcaggaatacgaagtgtaccagttggcaaacctgttgcttcatcaatgttttcgtagttataatcaacaaaccagtttacacttgggtcgccccacatatcaacacgagcattgttcaatgtagcgatatttgtcaatactacagaggaaccatcagtttgaacagcacggccttcaaagaatgcttcataatcatcaaagaatgcagccattgggattttttcatctgtatcattaccagctaagtcgatacctactaaagatacgaatttaatttctggatgttgttctaatagagataaaacaccttctttaccatattgacctgcaggaatgtaatacaataattcttttgtagccatatttgttcctcctaaactataaaaaaagactccaacaatatagatatacaaactgcatacctatccagtggagtcttcattgactaattattttcttgagtacatattaccatagtgagaaaattcttgtcaataaatttctatagaattttaccagaatattaacctagtaattcttttacgatggtatttactaatttaccatctgcacggcctttagtatgtggcataacatgtttcataacgttacccatatttacattatctccgcactcagcaatggctttttttacaacatcgcgaatttcaccttctgtcatttgcgctggcatatatttttgaagaatagctatttcttccttaacatgactaattagatcttcacgacctgccttttcaaattctgtaagagaatcttggcgtgttttcatttctttagctaaaatgcctaatacaccattatcatcaagttcaattttatcatttatttctgtatttttaatggcactattgaccatacgaataacagataaagctattttgccttcttctcgagccttcatagcagctttcatatcttcttttaattgatcttttaaactcatgggaacctcctatatgactcaatcattaaatacatattagcaccttaaaaactaatatataaagaaaccctaattctggatttcatgaagccatgaaaaggcagaattagggtaatcatcttatgctctgaatttgcgttttcttgctgcttcagattttttctttctttttacgcttggtttttcgtagtgttcgcgttttcttacttcagacaaaacacctgctttttggcaggagcgtttgaatcgacgaagagcactttcaagcgtttcgtttttaccgactttaatttcagacatctatatccctccctccaaaattaatctcagggaagtgctgataattttatttacgcacatatacatattatatgtagaacactaggttctgtcaatatataccgctacattttataggaatttttctagagtaatcaaacatttgtgacaaatacctatgccttttgattcataaagtactctgttataacttggtttggtgatttaaagtttaagactttttgtgcaatgttattatatctattagcatatcgactatgtgcttttagaaaactctccatactattaaacttacgagaataaaatctctcactatcaattcgatgactgcgctctacctttccattctgccacggagaaaatggtcttgtcgttttatgctctatttctaatctttttaatacaatatcaaataaacactctcgatcttttactccatagtttgtaaattcacgaccattatctgtttgtattgtatgaataggaaatcccattttggcttctaaatttaataagaaccgacttgtattagtaacacttttttcatctataatttttagaattctctttctagaaaactcatcaatagctgtaagttgatagtaagattttccttgtgttgaaaaggctaaactctcgcgaggtacgtattttatatcaatctgaaccttttctcctggatatgttactagatctggtttccacttgctttttggaacagatttaacaacctttttctctttaatgtgacaccttatttgtcggcacatagagccatatgagcgtttataaccacgcttttttgcctcaacatatacttgagacagcccttcatgtttaaacttagaatgcatacgcttgataagtgctagttcttcctcagtgtgttgattaggatgagaatgtggtttacgactatacaatcgaagtgaatcgatagtcccgtcgaaacgcttcacccaacgttgtacttgttgtctactagtatgataacggcgtgcagcttcagcattatttccatactttatagcatattcacatactcgtttacgaaatcttaattcttcagttataatagaatgcatgagaaggaactccttttgttgtaatgtttggattaagcaacttcattataacagagttccttctcattttttattcacttgtcacaaatgtattatactcttacataccgctacattttataggaattttattacaaatcaatattttttgatgtcttactacttcaaaattaataatttcctattacaagctattacgcttcaggccaacccatttcttcgccacctaatagatgagcatgcatatggaatacactttgaccagcttttgcgccagtattaaaaatcaatcgatagccatccttagaaataccaagttcttttgccacatcacgaacaaatggtaataaaccttcaacatagtcttcattcttctctgtaatatgagcaatattagcaacatgatttttaggaacaataagtacatgaactttttttacaggttcaatatcataaaaagcatagaatttatcgttttctaatactttttttgatggaatttcgccattaataattttacaaaaaatgcagtcgctcatggggacctcctctatcttattcaatgattacaaaatctttttcaacagccaccacagtaccgcctatgagatcacctatagagtgttgaccatctgatttaactctaccatgaatatattcatttgttaagcctgtataatatccattttcctctttttcaatgaggatttcaccagatttacctatacgagatgttgcatacgcatgtaaacctttttcgcttagatcatttaaaagtgctacgcgagccttcttaacggcttctggtacttgatttggcattgttgcagccggtgtaccttcacgaatagaatatggaaatgcatgaatatgagtaaagccaatttcttttaccgtattcattgtttcatcaaagtcttcatccgtttcttgtggaaatcctgcaatgatatcagtagtaattgataaatctgggatgcgatttcttaaattcttaatcaaatctttatattcttgaagcgtataatgacgtttcatcaatgttagaacatgatctgaccccgcttgtagaggtaaatgtaaatgtggacatacgcgcttatccgtagccattaattctatgagttcatccgatacttcaacagactcaatagatccaaaacgtatgcgatgtaaatttggaatttctaagagggcttttaccacatctgctagcgtaggtcttcctggtaattcaacgccatagtttccaaggtgaatcccggttaaaacgatctcatgaaatccatgttctactaaacgttttgcttcatttacaatatcatccactttacgggactttagtttcccacgcgtataaggaatgatacaaaatgcacaataattattacaaccttcttgaattttcatgaaggctctcgatttatcagattcattaccaaataatggcatctcttcaaaattagactctttcatgatatcgcgaacagcattaatttgacgttctgttgtttcgagttgttcaacaagttcaacaatttttgagcgattgtttgtgccaataactagattaacgccatcaatggcagcaattgcatcaggatcaagttgtgcataacaacctgtaacgataacataagcatcttgattttgacgtttagctttacgaattaattgacgagactttttctcccccatattcgtaacagaacatgtattaataacgtaaatatcagccttagaatcaaaatcaacagcttcataatcatgttgtaaaaataaccccttcatagcatccgtatcatactgattgacacgacaccctagagttgtaaaggcaacggttttcattgcacctcccatttctttatatagatatcatatagcatatgtatatagtattttataattctaattcatagtgaaccatcgataatgcagcaatcgcagccgtttcggcacgtaatatagtatgacctaatgcaactgattgtccaccacattctataatatcattgatttctttctcttgaaagcccccttcagggccaatacaaattaagatatccctattagttgaatcactattaatagcctttaaagcatcttttatggtatagcccgcttcattttcataagcaactaattttaaacattcagattcgatgtctaatacattagaaaggggctcatccacaacaagcgtaggtagctgtgtgcgcccgcattgttgagaagcttccaacataatcttttcccaacgactatattttgactgtaatttttttgcatcgtacttagcaacacagttcgaagtaggtacaagatatacggtatcaacattaagctctgtagctttttgtaaaacccattctaatttttcaccttttaaataagattgtactaatatggttctatgcatagatgtaggagaatcaatgtattctataagactagcttgtgctaagccatttatctcatcattaatctgatagataccacaacggttatcgctacctgtgacagtaattggtttctctatattatggcgaaatacatgtaatatatgatgagtcacatctttaggtaatacaatagattcatctaatggtgtaggaataaatatctttttcatcgtttttccagcgcaaatgtatgccaaggtccagcaatgcgctcctcaataatatgccactctttattaatataaggcataatctcatcataccgatcatcaataataccactaatgatgagaatacctttatcatcaagttttctaccaatttgtggcaataaaatttttaaaggatctactgttaaattcgctaaaatcaattgagcggttcccttaaaatcagtatccaaattaccacaaatgatatcagctacgacatgattattatcacaattaattcttgcctgtttagctgcatattcttctatatcgatacctacaagatgttttatacccaaatgagcagctactaacaacagaatacctgtcccagtcccaatatctaaacaagtaacagaatctaaattcatggatttactataggcctgtaaaagttctgcacaagttctcgtagtttcatgagaaccagtaccaaatgatatatctgaatcgatttcgataatagttttattctgttcattatcatattcttgccatgcaggtttgattattaaattaggtagtatttctgtaggttctatatactgttgccaagaattgagccacgtagattcatctaatatatgtgcatctattgatgtgatttcgatattgctttcgttaagacgcccctttatatcagacacaatcgtgttaggatctaatgatgcatcagcataaagcgttaattgtactaaattcggttgattatctacatcttcttctataattccattgtctgcataatcgccaaaaagagtagtcacctcatcggtggctactctttcgcagacaatagatatttctatccattgcataaatgctcctttactattgatgcgcaggaacaaaccattcacgcatcagagctgttcatttagttaaacgatccttgattttctcgaataaactcttactaacttgtaagttattcacatcttcattgccttctttggcaaaccgaagtaataattcacgttgtgtttcagttaattttttaggtgtttgaactgtaacgactacgtgttgatcaccacgttgttttggattgcgtaaataaggaatacctttgcccttaagtctgaatgcagttcccgtttgagtgccttctgggattttcaattctactttaccatctaaggtattcacttgtatagttgctcctaatgcagcttgtgcaaagctaatagtaacacgactgataacatcattgccatttcgttcaaattctttgtgagggcgtacgtaaatataaacgtataagtcgccttttgggccacctaatatacccggttcaccttcattggaaacgcgtagacgagatccgttatctacaccagctggaatcttaatatcgatttttcgttttgctaagatttcaccagatccacgacatttggaacatggtttttcaatgaccttaccagagccatggcaacgagaacaagtacgagcagattgcatacgaccaaatggtgtattttgaataacaacctcttgaccagagccatgacaattaggacatgtatcaactttagatccaggttcaccgccggtaccgtgacaatgattacattcttcatgacgttgaatattgattgccattgatttaccaaaggcagcatcctcaaaggatatatctatgtcttcacgaagatcattgcctttttgaggaccatgttgttggtgtccaccaccaaacatgccaccaaagaaatcaccaaagatatcactgaagccaccagcttgaccaccgaaaccgccaaagccactttggaaaccaccggcgccagcgccgcctccttgtttgaaggcgtcgtggccgaattggtcatattgagcttttttagtttcatcagacaatacttcgtaagcttcgttagcttctttaaactttgcttctgcttcctttggattatctttatttacatctggatggtattggcgagcctttttacggaaggcttttttaatttcatcttgggttgcatttttgctgacccctaagatgtcataataatctcgtgccattagttaccaacccttcttatttcttatcgtcatcaactacagtgtaatcagcatccactacattatcgtcagcttttgtttgttcaccttgtttagcatcaccagcagcttgttgtgcttgttgagcagcagcatacatttgttcagctaatttgtgcaaaggttgttccaaagcttcactatcttttttaatatcttcaatgttgccagcttcgatggattttttcaatttatccttagcttcttcaacttctttcaacaatgcagcatcgccattaccttcaagatctttcaaagctttttcagcttggtatactaaggaatctgcattatttttaacatctaattcttcttttctagctttatcttctgctgcatgagcttctgcttctttaaccatgcgttcaatttcgtcttctttcaagccgctagaagaagtaattgtaattttttgttctttttgagtacccaaatctttagcttttacatgtacgataccattagcatcgatgtcgaaagttacttcgatttgaggaaccccacgaggagctgctgggatgccatccaagttgaaacgacccaatgttttattatctgctgcgaattcacgttcaccttgcaatacatggatatctacagatggttggttatcagctgcagtggagaatacttgagatttagatgtaggaattgtagtgttacgatcaatgatacgagtaaatacaccgcccattgtttcgataccaagagacaatggagttacgtcaagtaacaatacatctttaacttcacctactaatacaccaccttgaatagcagcaccgatagctacacattcatctgggttaacgtttttagttggttctttacccaatacttttttaatagcttcttgtacagctgggatacggctagaaccaccaactaacaacactttatcgatatcagatgcagataagccagcatcgttcatagctttacgagtaggttcaatagtagcttgtaccaaatcagcagttaactcttcaaatttagcacgagtcaatgttacatccaaatgtttaggaccagtagcatcagctgtgatgaatggcaaattgatgttggtgctagctacgccagacaattcaattttagctttttcagcagcttcttttaaacgttggtcagccaatttatcattggataaatcgataccagtttcttttttgaattcttcaataaggtagttcatgatacgttggtcgaaatcatcgccgccaaggtggttattaccagatgttgccaatacttcgaatacgccatcaccaagttcaagaatggaaacgtcgaatgtaccaccgccaaggtcaaatacaagaactttaccatcttcgtctttatctacaccatatgcaagagcagcagctgtaggttcattgatgatacgaagtacttcaagacctgcaatagaaccagcatctttagtagcttgacgttgagcatctgtaaagtatgctggaacagtaataacagcttgttttacaggttcgcccaaataagcttctgcgtcagctttaattttttgaagaatcattgcagaaatttcttgaggtgtataagatttaccttctacagttactttgtagtcagaacccatatgacgtttaatagaaataattgtgttttctggattggatacagcttgacgtttagccaattgaccaactaaacgttcgccatttttcgcaaaaccaactacggaaggagttgtacgtgcaccttcttggtttgtaataaccgtaggttcgccaccttccataacagcaacacaagagtttgtagtccctaaatcaataccaattacctttgccataatatatgacctcctaatacttataatctattcaacaaccttaaccattgctggtcgaatacaacgaccatccacagtatagccagtttgcagtacttcacataccgtatcagattcgtattcatctgatggtacgcgcataattgcttgatggaaatttggatcaaatggtttaccaactgcatcgataacagctaaaccatgcttagacaacatagccatcaagttttgatgaatcatgataaatccatcaaggaatacctttgtatccccttctgcaggagcttgtacagctcgctcaaaattatctaatacaggtagcaaatcttttaggacatcgcccttaacaaagcctgccaactgttctttttcttgattagtacggcgtttaaaattttcaaaatccgcttgtaagcgtttataacgattatcaaaatcggcttttaattcttctaacacctcacttgcatcaactacagactcttcagcattttgcgcttccgattgttccttcgttgcttctgtaggctcagaaatttcttcgtctaccacatcttgtttaattttttcttcagacatgccttatcctttctatgtttgatttcttgccatcgtttccattaaatgtttcatataggaaagcatattaataattcgactatattccattcgcgtagggcccaatatagccaatgtaccaagttgattattatcttgagaaaaatcagtttgaataagactcatatcacttaatgcttccatttgattttctgaaccaatcttaatcttaattggtttgtttgaattatcttgcaatatgtgacctaattcttgttgttcttctaataatgaaagtacaggctgtaccttttcaaccgttttaaattccggttgtcgtaacaactcagtagtaccaacggaataaaataaacgtcgctttgtgatggcccttaataaggtttctccgatttgtaatgatacggattttgaaccgtctatgtgtgcgataattgcacttatttgagccgatgtaatatcacgtaaaagcttattttgaacggcattgctaaattgtatagctaatcgttgtaattcatcagctttcactggtgatgtaaaatacatcaattcattatcaagtgcaccggttgcagttattacaaccataacagcttggtgagcatcaagaggtaaaatatgtatatattttaacattgcttgatcatgtccaggggctaataataagctcatactatgactgatttgagaaactaatcgagccatatgtaataacatttcattgccagaaagctgcgtatcattccatatagaatggatttgtttcacatcctcattctccactggaccttgatgcatcatagaatcaacgtataagcgatagccttttgacgatggtattctaccagctgatgtatgaggtttttctaaatagcctaagtcctcaagatcagccatttcgtttcgcaccgtggcaggactaatacctaagttataatttttagcaatcgtcctagaaccaacaggctcagcagattttacataatcctctataatcgctcgtaagatgcgttgttttctttcatccataatgacacctcacttgttagcactcaaaatattcgagtgctaatcgcatgtataatattaccataccaaaataaaatgtcaagtaaatttatccttaaaaacctaataaaatcaagtttagtcaaaaagacaatgttatttcacagaataataggtcaaaaagacaactaaatagatatggaaaaatagtcaaaaagacaaggcctatctatatttataaggttttatagaaatataaatagctcccagtcaatttatcactaggagctattgttaaattataaagttttattttctaatggattgccaagacgttctaacaatttccccatccgttcctttggttccccattttctgcataccaatcgatcagtatatcagcagccttctttgcttgttcaacagataatttacgcattagtattttccctgcttcagggcgcataccagtattaccacctacggcgagcataaatccttgagatgtaccaataaaggcaatatctttaaccatagaatcaggacaattacgaccacaaccactaattcctattttacatttgtgacttgttttacgaccataatgtttacgttctatataatctgctaattcagcagtctccatctgaccgtttttacattttcctttacctacacaggcaattaatgaattgacacctctatgaataaccgtagtaaccccatcaggtaactcagcaatcaaagcctctttatcatccttatcaatacctgtaatttgtataccagtcaccacatgtctaaaggaaccaccgtatttttcagctaatgatatacatgctttcatttggtccaaagaaaattcattatgtaatccatgtattataacagatgtcttcatctttcctcctaaataagcatgcatattcatcatcatcctatttatcctaacatgttacttattgagaaactatgagaaatcttactcttttatgaattgactaaacacataatttccatgcttagcaccttctggcgtaagataatataagtcgccatcttgtattattaaattcttttcaattaaattatctaaaatagagccatatatatcttctaatcgtatattaaatctgttagcaaaatcgactgtattgattccccacttggttcgcaagcttaaaaaacaataatcttctctagctcttttggaatcgataacttcctcatctacaacaggaaattcaaagcagtctatttttctagcataaggcatgacattacgattattagctcttcttacactatcaaaaaatgaatgagcaccagcaccaaaacctaaataatcacaatattgccaatattttagattatgtttactataggccttatctttcgcaaaattggatatttcataacgctcaaatcccaaatcttgaatcccttgcatcatcatgtcatacatcgtatcctctgttgattcatcaggtaaagaaatgactcctttatcaaccaaatgatataatcgtgttcctggttctacttgtaaaccataggtagaaatatgattaataggcaatgtactaacaatatctaaatttttattaatttcatcagttgtttgattcggtaatccatatattaaatcgatattaatatcttgaaatccttccttaaaagcccattgaactgcatgtatagcatcctcacgattgtgacttctatgtaaacttactagagatttatcattaaaagtttgaaccccaaaactgatacgagagaatcctaacttatgcagcccctttaaataagcccgatctacctctccaggatttgattcaatggtaaactgacaatcaggagatacattataggtagttttaatggtattcaaaatttgttctaactgtaataaggataattccgtcggtgtaccgcctcccaaataaacagtatctacaagtttagtacgagatttaggatatgcatcaccgaacatagtcatttcttgaaccaaggcatacagatatgtatcgtaatattcctctaaattttgatacgctggaaagtcacaatatatacatttttgtttgcaaaacgggatatggatgtatatccccatatcccgctgtacaaacaaatcgttacgatttgttaccatattaatcttctacctttaaaattgccataaatgcttcttgtggaatctctacagaaccaacggctttcatgcgtttcttaccggccttttgtttttctaagagtttacgtttacgagaaatatcgccaccataacattttgctaaaacgtctttacgccaagcttttacagtttcacgagctacaatttttgtgcctactgctgcttgaataggaatttcaaacatttgacgaggaattaattcttttaatttctcagctaatgcacgaccacgtgtagcagcgcgatccttatgaacgatgatagataatgcatctacaggttctccatttaacaagatatccatcttaaccattggagattgtttataaccaatcaattcataatcaagagatgcatacccctttgtagcagattttaatttatcaaagtaatcataaatgatttcgcttaatggtaagtgatatacaacggatacacgcgtttcatccaagtattccatggattgatattcgccacgtttatcttgagacaattccataatagtaccaacaaaatccttaggtacaatggtcgtagccttaacatatggttcttcaatataatcgatttccgttggaggtggtaatttagcaggattatccacttctagcatttccccatttgttttatataccttgtagttaacagatggagccgtagtgataagtgttagattatattcacgctctaagcgctcttgaataacatccatatgtagtaagcctaagaaaccacaacggaaaccaaagccgagagccaaggatgtttctgcttcatattctaaggcagcatcattaagctgcaatttttctaatgcatcacgaagattttcgtagtctttagactctgtagggtagagaccacaatataccatagatacagccttgcggtaacctggtaatggttcaggtgcaggattattagctaatgttaccgtatcacctacgtgacagtcagctacattcttaatacttgctgcaatgcaacctacagaaccacatggtaattcttggacaggcacaagatttggtgtaaagataccgagctcagttacatcaaaatccttattatcatgcatcatacggattgtatcttttgttttaatagtaccttcttttacgcgcacataagcaatagcacctttataagcatcaaagcggctatcaaaaatcaatgctcttgttggttcatcagatttatctggtggtgcaggcaccttatttacaatagcttctaaaatatctggaatgccaatgccagatttagcagaacataatactgcttctgatgcgtctaaaccaatgatatcttcaatttcatgtttaacccgatcaggatcggcagaaggcaaatctattttgttgataacaggaataatttcaagatcatgttctaaagcgagatacacattcgccaacgtttgagcctctacaccttgtgcagcatctacaacgagtaatgccccttcacaagctgcaagagaacgagatacttcatagctgaaatccacatggcccggcgtatcaataaggttcaaaatgtattcttcaccatcttgagccttatacaaaatacgaacggattgcgctttaatagtaataccacgttcacgttctaaatccatggaatccaatacttgagcttccatttcccgtttttgtaatgtaccagtatattcaattaatctatcagcgatggtagatttaccatggtcgatatgagctataatacagaagtttctaatctttttcgttgacatactatatgaacaagttcaaggaacttgtattctcctttctaacatacgcgatcgataacagcacctcctaataattgagtgccattataaaaggctacggactgacctggtgtaatagcccgttgtggttcatcaaagataacctccatcgtatcgtcgtctaagatacgtgccgtacaaggcgatgggttggctgcgtaacgaattttaccttccgcctttaactctttatggattgtatcatctaagaaattatagaacttacaaatcatacgattcgtaaaaagtcgatcattaggtcctacaataacttcattgcgttcaccattaaagccaataacatataaagggtgtttataagcaatgcctagtcctttacgctgaccaatcgtgtaattgaataaacccgtatgctttcctaatatttcaccatcttcagtaacaatattaccagattttggtttagttttcatttcttctactacgagtttttgataattaccatgcggtaagaaacaaatatctacactgtctggtttcttagctactggcaaatcatattcagcagctaatttacgcgtttctgttttacattggccacccaatgggaacatgaggtgactcaaaatacgttgattcatattatacataacatagctttgatctttagttgggtcaacacctttatgcaattcatataaaccagtgccttcattataattaacctgtgcataatgaccggttaccatatgtgttgcaccaagttcaagggctcgattgagcatcaaatcaaatttgatatttttattacagaatacacaaggatttggtgtacgaccataagcatattcttttacgaaataatctactacattctcgtagaatacatcgcgagcatcaataacatgatgctcaatacctagaaaatcacacattttcttagcatctgttacggcaagaggcacctcatcatacggtgtcccactcacccatagccatagggtaataccaaatactttatagccttgttttagtagcattgcagcagtcaaagaactgtctacgccgccactcatagctacagcgataactttttccatactttctccttttaatgatctcttgatcataaaactaatcagggtgaaagcctgacgtgtaaaacactagttcggtgtaaaagtccgagtagtattgctatgaaattatagcaacttatattatagcctagaacgaggtatattgaaaagatttgaaacaaaagaatctctttccatcaaagaaagagattctaattattatctatgttttaataattcctctgccgcccctaaaatgccgagcatagaatgttcgaatacaagaccaccttgcatgaagattgtatatggagagcgcacagggccatcggcactaagctcaatagatgacccttgtacaaaggtaccgccagccatgataattttatcttcataaccaggcatatccccaggaattggatgcacatgcgcatctacaggagagtaagcttgcatacctacacagaaatgctccatttcctcgccattttttaaattaatggcttgaatcaaatcataacgcgctgcatctaccttaggaaatacttcatatccaagtaattcacctactgcagctgtatacacagcccctttaagagcttgtaatactacatgaggagccataaacaagccttggaagaataaacggtaaccaggcgcataagagcccatatgatcaccaagccctggagccgtcaattgatatgatgcatcttcaactaaatcctcacggcccacgatatagccaccggttggtgctaaaccaccgccagcatttttgatgagagaacctgccatgatatcagcaccggcctctaatggctcttgaagctctgtaaattcaccgtagcaattatctacaaagcaaatggtttccggattcttagctttcacaacatcaacgatcgctttaatatccgcaatcgacaatggctcacgagtactatacccacgagaacgttggataaccacagcacgtgtattggaattaacagcctgtcctatagcgtccaaatcataggtattattgttaaggggcacttctgtataggtaaaacctttttcaatcaatgaacccttaacaggacgagtatagcctataacggattgcattgtatcataaggagctccaacggcatagataaattcagttcctttagagccatttcccataatagccatcagtgtagtagctaatgcgtgagtacccgatacaaaatgtggccgcacgagagccttttcgcctttgaatacataggcaaatacttcatctaatttttcacggcctacatcgttataaccataaccggttgtgcctgtaaaatgatagtcagatacttgacactctttaaatgcttctaatacctttttcgtatttgctaatgcaataggttcaaactttttaaattgtggttcagccatttcaagggctttactacgtatttcttctaatgtcattctctatcctttatctattaaaaacttgagtcaattatattacaagctataccataaatttcggcttctgttgtttgtgagtctatggtaatccattctatgtacgacatacgtttataccacgtgatttgtcgttttgcaaagtgacgcgtatttttctgaattaaatctacacatgcgtcataactgattaatccttctaaatactgaacaacctctttatagccaatacctttaaaagcctgacaatttggatttactccattttttagtaattgtttaacttcatccacgagacctttttcaaacataatttctacgcgacgattgattcgattatataaatcactacgttctcgttgtaatccaataactgggcctttataggataaaccatcttttgtttgatttattaacgatttataatcaccagcagtcatcaattcaatagcacggtacaaccgatgtttatcggtatatttaatttctatgccacctttttctgccaaattctgagcatactcacgtaatccatttacgccatattcagtatataactcatctaattcgattcttaattttgtattaggctttatatcattaaaattatagttttctaacaaagactgaacatataaaccagtgccaccagataagattggtataacatgattgtcatttaattgatctattaatgatttagcttgttgttgaaagatagaaacactgtaatcatcgtcaggttctaaaatatttataagatgatgaggtacagcagctaattcatctgttgtcggctttgcagtaccaatattcaactgtttatacacctgatacgcatcaccagaaatcacttcgccattatagcctttagccaatgctaatgttaagtcagtcttacctacagccgtaggacctacaattgttattaactttttcattgtaaccccttatcactgtaaacaccatatccaatacgactatacttgccgcccacccatgtggatggtgggaaatctttaaatacagaactaaacggtcgttctttgataataaaacctaatcgacaaacgcgcctagcttcctgaatcacagaatctgtgattctaccttccgaagtatgcccacgcaacggtttaaattgaggactttcttcaataggaacttcaaacatagggtcaaaatataatatatctacactatcgttaggtagcccctgtaaaaagctttcaaaattatcatgacgagcatcaatacgacgtagtgcatttgttacagtcatatcctcatgagtataatatttcaatccaaaccatgtagatagccatataggatatgacgcctctaatcctataatatgtgcactagggaatgcataggacatgataatactatcactgccaaggcctagtgtacaatcaactatagatatggaattagatgattcagttgttaacaattctatagcgtttacaagatggtcatcatctccgcgttgtaagcgtaaaatacgcaattgagccatggataaatgaaatctatgttcctgttcttcgttaaaatgaattgtcaattgattcttagaaacaaccgcaataggtgtatcctctaataatagttcagaaataggtctcttttgacgatttagatatactaaatctaatgatttagctaattcttttgtttcttcttttatcgctgaagacgctttttgtgaagtagtaataatcatattaagaccttaagaataacttacccagttcatcagatgtaaatttaataattgttgggcgaccatgaggacacacataaggtttatctgtatggaataaatcttcaataagtgttgtcatttggtacatattaagattgtgtcccgatttaatggcacccctacacgatgcataagctagcatttcatgacgcaattgggctttggtgggctgttcatggtcatgcaaaaaagtaaatacataagataaaatttcctgagctttactttctactagatctacaggtgcaccaactaacttgatttgattaggaccgccaagctctacttcaaagcctaaatccaacaaagcatcctgttcattctcaacaagattcatttcatcctctgtggcattgctataagtcggtacaagcaggctttgcattggtatagattccgaagatttacacaaacgatcataacggacacgttcgtgtgctgcatgctgatctataatatataaatcatcaccttttttggctaatatataacaagatgcaacctgtcccattggtaaaaagcctgatttttgtatatctctagactcatcttctatatgctgttcttgtatttgatggaatttctctttatcttccgccgtatagctagtataagctgtaggaactgatgtaaatgaagattcctcaaatgtttcctgttcatacgtcgcttttggagctggtggtgtaaaccctttttcttttaaggcatctacaaaatcgcgtgtatcctgacgtaatacctcatatcccttagtgcgtcgtccgccaaaaaccttatcatagtcaatggctgtagcaatatgttcagccgtatcattatgatcactcaaaacttgtggagcttggtacgagttatagccactaccttgtgattcagtttctaaaggttgagtaaacgatgatgattcacgttcataccgttcatgaagagggttatttaaggcatttagaattgcatgataaacagctttaaatatgattttatcatcttcgaatttaacttcactcttccgaggatgtacattgatatccaccatactagccggtacagttatatgtagtaaaaccaatggatatccagattttggtaataatgcatggtacgcattatctatggctttcaaaattgttttatctgatataactcgattattgacaataatcgtctgccaaatacgcgtgctttttaacaatgttggttttgatacaacaccttcaatatagatatgttcactttcataagcgataggaaatatatcattcttggtcttataaccgtataatgcagccactgtatcttgtattgagccagatcctggtgtaataatggctacacgatcatcaatagttaatttaaaagcaatatgcggattacttaacgccaatttaccaacaatgtcttgaattttagatgattcagttcgttcagttttaagaaatttacgacgagctggtgtattaaaaaataattccttcacttcaattgtcgtaccaggtgctgcaccataaggaatacaatcagtaaaggttcctccatcgatgaggatacgtgtaccaagttcttgatctacagttctagtagtcaaaacaaaatgagaaacagaggcgatactcgccaaagcctctcccctaaaccctaaggatgcaatatcaaataaatcctctacattttgaatcttagaggttgcatggcgcaaaactgcaaggcgggcatcttcttctgtcatccccttgccattatcagtaatgcgcatatatgcactaccaccttcaccaatttccacttcaatcgatgtagcaccagcatcaatagagttttcaatcagttcttttacaactgatgcgggacgttctacaacctcaccagctgctattttattgattgtagtttcatccaaaacatgtatggttgccattatttaccgcctccattacgcgcctccgcttgtaactgatgaattgcatttagcgcctctataggtgtcatcgtattcacatctatagctaacaaggaatccacaacagaatgggtgaataaattgccaaaatcatcttgttcgatagatggtttagtatacttaacaacagaatctgatgttataacgcgattatttaaatcatcggtgtcggtattttgttcctctaaggattcaagaatcacttccgctcgtttcaatacttgagctggtaaacctgctaattttgctacgtgaataccatagctcctatcggcaccacctctaataatacggcgtaaaaaggctatatccttacctttttcctttacagctaccgtgtaattcttcaaacgagggtatacgtcctccaaaggtatcaattcatggtaatgtgtagcaaacaatgtttttgcatgaatatgtttacaaatatgttctaccactgcttgtgcaatacttaaaccatcaaaggtacttgtaccacgtcctatttcatcaaggataatcaaactcttagaggtagcattttcaagaatatacgcaacctctttcatttctaccataaatgtactttgacctgtagaaatatcatcgctcgcacctacacgtgtaaatacgcgatctacaggagaaatagtggcttctctagcaggaatgaatgacccaatttgagccataatcataagtatcgctacctgtctcatataggtagatttaccagccatattagggccagttataagcataaattcttcatcatcatgattgagtactacatcattaggaacaaaaacctctctttttaagaatttttctatcaccggatgacgaccatcacgaatattaatttgaccattcataacgatattcgggcaaatatagttagactcataggcaacagtcgctaatgatgcaagtacatccagttctgccaaagctctagctgtttcctgaacctttttaataacgcctttgatttgatcgcgtaaatcttgatagagctgttgctctaaggaaacaattttttccttggcacttagaattttaatttcaaattcttttaaatcaggtgtaatataacgctctgcattgactgtggtttgtttccgaataaaataggccggtaccttatcaatttgagatttacttacttcaaagaaatatccaaaaaccttattatatttcgtttttagtttaaggcctgtttcttctctagccttatcctctaacttttgaagccaaacctcactattggttgctaaggatcgtagttcatctaattcttcgttatagccatcccgaattacgcgtccatctttcaatgttaatgccggttgttctgcgatagctcgattcaataaatcatatatatcagcatgattatcaatgcgattattaatagatgacaatgaaaggccagaaaattctttaagaagattcttaatttgcggtaatacttggagggattcacgaagcgatgtaaaatcgcgaggcgatacagaacctgtttcgatacgacctacgatacgctcaaaatcataaatacaatctaaataactttgaatttcgcatctttcaccattgcgagatatgagttccgcaacagcagcttgacgtcgttgaatagtagatatatccgtaagagggctttccaaccattgttttaataaacgggcccccataggtgttaatgttctgtcgagcacatctaataaagtcccctttacaccgccatcccgcaagttgtgtgtaatctcaagatgacgcaatgaggatgtatctagaatcaaacgattgcctacatccatctgatgaacataattaatatgggctatttctgtttttattacatcttgtaaatataagagcataaaacctaatgcagctaatacatcttcctccataaggcccatatcttgaaagtgattatttgctaatttacatgcatgttctacattttcaaaggaggcaaaaggggataatactacattattaaattgattatgaataaaatcaacaatagattgtggcaaaatagttccttcaggaacaatgatttcagcaggtctatacatgctaagagaatcatatatttgacttatattgttttgaggtacacgatcccaaatgacctcacccgtagatacatcggagaatacaagaatccaggcctctttaactaaatagaatagagctaaaaagttattactccgtgcatcattaccattttctgtcattacggttcccggtgtaatgacttggataacatcccgtttaacgatgccttttacggccttagggtcctctaattgttcacaaatagcaaccttatacccctttttaaccaaagtttctatgtaactttcagcagcatgaaaaggaacgccacacataggtgttcgttcctcattgcctgtcggtctacctgttaaggtaatattcaattctcgagatgcaattaatgcatcttcattaaataattcataaaaatcaccaagtcggaaaaatagaagctcatcgctatgtcgcgatttaatatctaaatattgttccatcattggtgttactttttttgccattcttaccccttttgaatggtaccgtagcagacccatgtttgtgctttatcaatataggctggtacagtatcaccgatagttaactcatcatcttttgggaatagtaccatcttattcccggacgtacgaccgaaccacatggtttcatctttagcacttggaccttctacaataatatcaaatactttgccttccatagttttattgagttctaaagaaatttcattttgaatatccatcaattgttgtagacgaacgcgttttacttcttctggaacttgctcatccatggtagcagcaggcgtaccagaccgtttagagtaaataaaagtataagccatatcgtagcgaacatcttttaataattgaagcgtctgttcaaaatcttcctcagtctccccaggaaaacctacaataatatcggttgttacaaccacatttttaattttttctctacagtaggataataattctttataatgttccaccgtataatggcgattcatcttctttaaaattctatcagaaccggattgaattggtaaatgtaaatgcgtaacgatattactagagcgccccaatgcatcaatcattgatttggtcatatcttgaggatgacttgtcatataacgaatacgttcgatgcctgggatatgatcaagggcatctactaatgtgccaaaatcagtaccatctttaaaatctaagccataggaatttacattttgtcctaacaacgtaatttccttaaacccttttacacccaactctgttacttcttttacaattgcttctacgggacggctaatttcgcgaccgcgcacatgaggaacgatgcaataagtacaaaatttattacaaccattcataatcggtacccaagcaaaaaatgtaccattaggttttgcctgtaattctggaagtactgtattatccatgtcaacattgatttgatgcttatgggtacgttgaacctcagcaatcatttcattaatatgttgaatattatgagtacctaggacaatatcgatatgaggtgcgcgtttaaacatttcagcttgatttttttgtgccatacaacctgtaatagcaatgatcaaatttttatttttttgttttaaacgttttaattcaccgatacgaccaaatactttcgtttctgccgtttcacgtactgcacaggtattcaataatattaaatctgccgattctacatcatcggtcggtatataacctactgtttcaagttgatgtgaaagacgctcagaatcagcggtattcatttgacaaccataggtatatatataatatgacttcattctatctcctaaatatgttttataatcttacgttttgtttctacaatattttttacttttatagacatccgctctacagacatgcccgtaatatattctaattcgttgcgtacagatttttgtacctgttgcatcattggtttaactggatgaccttgttcaataacaactgacatatctaatattaaaccattctgccctttagagctctttttgaaagcgatgtctgatgaggcatcaacaccaggaaccttttttaggccatttctaattaatttaatgatgacatcatcatcaaatgttagacgaccataataactaaaggctggtctaacaacggaacgttcaaagccttcagatccaatttgaccaattttatcaggatcttgtttacgcaatgtacgtcgtctccaaatcgtcttaattggatcgataagatatcctttaaagtgaggctttaattccatggttggcacaggaataatatgcttaccttcttttaaacgagcatactgtgctttttcaatttctttaggggttgccacatcttcgatgcgaatatatcgatctggttcttgaagccccaatgcctttgtaatttttttgaccatattatcggatgtaccgataatcatcaatcgattcggcttgataacatctaattgactacgaacctctttaacttgaaccggatcttggaatatagcacgacgaacggcctttaatcggctagattctttttttgcagaaaatccagctacaattttattatcatgaattaaaataccatcatcaataatgcattccacactattttcatgagctagtacgagagcccgatgacttttaccggtcccactaccacctacaaaagcaataacttccatagtacacctcacatctataattacgctgatatacaacgtatgcgttcgataaattgatttactagattactatctacaacatattcacctaaatgataagggtatcgattaggtattccatgataatcagatccacctgtaacaaataaatttcgttcttttgccatggttaaatattttatttcatcatcataatcatgtttagaatgatatacttctacaccatcaaaactatagtttaatagttccgcgacatactcatcattacggactaattttggatgcgctaatacagctaggccatttgcattatgaataatatctaatatttctggaacttctaattttactttaggtatataacacgggctttttgaatttaatataccatcaaatacatcttgtacatctttggcaaagccatgatctattaataatctagcaacatgtggtctaccataggacttagtatttggatataaattttgtaattcagaaaaagaaatgtcatagccatgagcaatacatcgactaataatttcttttattcttgattcacgtttttctttaaaaaattcaatgaatttccgtaatccttcatcatgatgattaaatccataacctaagatatgaatatccttacctttatagtgaccactgaactcacaacctgtaataatttgaatagaactattattttgtaacattacatctataccagcaatttcatcgtgatcagttaatgcaatcattttcaaatcagcttcaatagcatgctgtaatagctgttctggtgtttctacaccatcagaaaatgtagaatgcatatgaaaatctacacgcataattacctccaaattattacattaccctatcattttattatgacttattccgcttgtttattcaagtttttacaaggtattaactaaaagttttcaatatgaaattggatgtattcacatatatataaatataaaaattgcgattccaatgagcattcactagaatcgcaatttaattataattggctcaataattcttgtaccttgttagatacttcatcgattggacaattaatagcttcacctgttttacgaacgcggatttcaacctcattgctttccaacgtatttttacttactgtaatacgtaatgggtagccaataagatcagcatctttaaacttaacaccagcccgatctttacggtcatctaataatacatctactttattgtttaacaatgtatcgtaaatagatgtacttgtggacattagagcttcatcttttgcgttaataggaacaataactacttcaaatggagctatagcacgaggccaaataataccattttcatcatgatattgttcaatagctgcagctaatgtacggctaacgccaataccataacagcccataaccattgcattaggacgaccattttgatcaaggtatgtagcttgtaaactttcagaatatttagtacctaacttaaatacttggcctacttcgatacctttactgtattctagaggactatggcattcagggcacacatcgtctttagtaatcaaacgaataggtgctacgacaatatcttctgtattaaaatcgcgtttaggattgatattgatgtaatgagcatcagctttattggcaccaccacaaacattgtaagtttccataacagattcatctacaacaatagcaaaatcatcggtttgtttgagacctactgggctgataaaaccagctgtcaatccaaccttttccaattgttcaggtgttgccatttcaggctctacagaaccattaacagcatgttgaacagccacttcattcacatcatgatcaccgcgaaccatagctagaattactttatcttcaatagcatatactactgctttaatagttttttccaaaggtaaattgagcatctctgcaacagcttcaatagtagatgcatgaggtgtatctactacttctaattcttttaaagcttcttctgcttgtttcataatgccaggtttaccgatttcaatattcgctgcatagtcacaagcggaacagtgaataatatctgcttcaccggcttcagcaatagccataaattcatgggtattgctaccaccaatagcaccgctatctgcttctacaggtctaaaagtaagaccgcaacgagtaaaaatacgactatatgcatcatacatatttttgtaagaaacatctgcagctgcatcatcaatgtcaaaggagtaaccatccttcatgataaattcgcggctacgcattaaaccatatcgtggacgacgttcatcgcggaatttactttggatttgataaagattaactggtaattgacgatatgaattaatttcattttttaccaatgttgtaatcatttcttcatgagttggtcctaagcagtactccacatcatggcggtcattgatacgcatcatttcagcaccatacgcattccaacgatcagattctttccaaatctctgctggttgcaaaataggcatcataatctcttgtgcaccagaacggtccatttcttcgcgaatgatagcttcaatttttttgatgcttcgccagcccaacggtaaaaaactatataaaccattagcaaccttacgcataaaacctgcgcgcaacataagctgttgacttaccacatctgcatcagatggaacttcccgcaatgttggggcatataatttactggctaacatacaattactccttatcaattgtttctaaatattgatctatttctctaaataaagtatctactagttcagattcgggtacggtttttaaaacttccccttttctgaatacgataccttgacctttgccaccggcaataccaaaatcggcttccctagcttcaccaggtccattaacgacacatcccattacggcaaccttaataggtgcagaaatggatgctagacgttcttctacaatgcttgccatatcaaataaattaacttggcaacgaccgcatgttgggcatgaaatcatggtagctccaaagtttctaagacctaaattgcttagaatacttttacccacctcaatttcatgaatagggtcacctgttaaggatacgcgcaaggtatcaccgataccatctaataacaatgcaccaatacccatagccgatttaatcgtaccttgtttaatggtaccggcctcagttacacctaaatgcaatggatatggtattttatcggaaagctttctataagcttctaccataagtggtacttcggtagctttaatagaaatcttcatttgtttatagtccaatttctctaaaatacgtacgtgttccaatgcggtctcaaccataccatcagctgttggatgacctccataagcgtctaatatatgttgtggtaaagaaccagcattgacaccaatccgaattggaatttgcttaggtttagccttttcaataacggccaacaccttatcctctccaccgatattacctggattaattcgaaggccatctacattattatcaatggcttctaatgctaatttataatcaaaatgaatatctgctataagaggaatggttattcctgcacgtaccgcttttaatgcttttgcagattccattgtaggaactgcaactcgaactaattcacaaccagcatcagctaatcgattgatttcagcaatcgccttttccgtatgtacaggatcagtagtaatcattgactgaatactaacaggtgcatagtcgccaatttttacattgcctacatagataccatttgttggttttctagtaatcatatataactcctaactatgacttatttatagtaattgtagtatatcttttgcagtagcatatacaaatatggtaactaatagcgcaataccaatcatttgaatatacatcaaagctttagccggtaatttacgtcttgtaatggcctctattaaaatgatgatgagatgcccaccatcaagaactggtaacggcaaaagattgataacacctaaattaatacttagcaatgcagcaaaactcaatagaggtgcaaagccttgttgagctatagaacctgccatatgtgaaatgccaaccggtccagatacttcagcctgctctgtacctacaaccatttcacgtagtccatctaccatagctacaataatatatcctgttttctgaacagctagtatgaaagaatcccctatactatgaggtattgtttcatacgcttgatatatacctaactttggtgtatccttttccatctttggaattacagtagtttcaactgtgtcaccattacgatttactacaacggtaacaccgtgattagctgtgcctttcaaacgttcagaaatctctgaccacttggaaataggttggttgtcaatggaaagtataatgtctccgccctgtaattttcctaaatctgcagcaccacctgtaataacactgccaattataggcttatcagtagaaaccattgtccccactgtagcatttaggccgaaataaatgactatagccaataagaaattaaaaatagcaccagcagaaataacaataagttttttataagctggttttgtatagaatgaaccatcatctaatggctcatcaggtgtcattccagcgatgcgattgaaaccacctaacggaatacaacgaacagagtataaggtctcgccatactgtttttttaataaaacaggaccaaaaccaatagcaaattcatcaacacgcatgcccgataattttgcagttataaaatgacctaattcatgaataaacacgattagaccaaatacaaatattgtggctaaagccgtaatcatactatctcctatttataaattctgaagcttttatgcgagcccattgatcgatagctagtaagttatcgagagtaaaatcatcttctcttcccatggattccaaaacagcggtaacgattttatagatatcgctaaatatgatttttccatctaaaaatgcatatacggcagtttcattagctgcattaaatacggctggcttaaaaccaccaattttaccaacttcatatgctaaatttaaagcaggaaaatcatccactctaggaggcataaactcaagagtgagtaattctttaaagtccaaatgtttcatatcaaggtgcatccgtttaggatatgttaaagcatattgaattggttcacgcatatcaggattacccatttgtgcaaggatagcaccatcatttaaacgaatcatagaatgaataatactttgagggtgaaccaccacatcgatatgatcaaaatcaaagtcgaataaccaatgggcttcaattacctctaaccctttattaaataaagaagcagaatcaatagtaattttgctccccatattccatgtaggatgttttaaacaatcctctgccgtagcagaagcaatacgttcactagaccatgttcgaagtggcccacctgaagcagttaatatcaatgaatctacattcgatttagcttgtccttccaaacattggaaaatagcactatgttcactgtctataggtaaaatagcaacattatattccttagcaagtgccgtaattaaaggtccacctgctaccaatgtttctttattggcaaggccgatagtcttgcgggccttaatggcctctacagttggctcaataccaacagcaccaacaattgccgtaaccaccatagtagcttcttgaattgtggctgcactgatcaaagcttctttaccacctataattatagtggaaccatgataacgttctttaagaagcatatatgcttgttcatcaactacaccagctattaatggtttaaattcattaatttgttgttctaataaatcaatattacggtgagcaactaatgcaacggctttaaactggtcaggatgttgcttaataacatctaatgtttgtgtaccaattgagccagtgcttcccaatatacttacatacttcataaaagccttcttttctgtttatgtttattatgcaaaacataaaattaataataatgtaaccggtgcggtaaacattaaactatcaaaacgatctaaaaccccaccatgaccaggtaatagtgtacctgagtcttttacattacataatcgttttaatttagattcaaataaatcacctaaaggtgctaatacaccacaaatgatgccaacataggcacctatataaactggtatatgactgattacagcatacacaataccagttacaacacagccgataaaaccgccaataaaaccttctaatgttttattaggacttatggacggtacaattttacgtttaccaaatgcacgaccggcaaagtacgcaaaggtatcgctagcccatgttgaaaacaataataaccatagcataactacgccccaactttcaccaacaataggcattgttaatgaactgtagagccagtcatgacgtatcaataataatgagcctagtcccattactatatatagcaaaccaaataagctataagaaacgctactcatagaatatgtattttcaccaaatgtacacattagataattggaaataatggcgaatacaaagcaagccatacttactgtataactgccaaaccacaaggatatcatgatagcgataattgaaaggtatccccacaataccggtacacgaacatgtttagccttacttagcagtataaattctcgccatccaataagtgctaataatgtaatgagtatatcatatgttaagccacctagtgtaatggcacctaaagcaatgataaacccgataactgcagtgataacacgtgttttaagcatcgattattcctcttgcaagccaccaaaacgacgttctcgtttttgataggctgctatagcttctaataatgtttcttttgtaaaatctggccaatgtaaatcagtaaaccaaaattcggcatatgctaactgccataataaaaagttactaatacgataatctttgctaggacgtattagtaaatcgacatcactaaactcttgcgtatacaaatgactgctaacatattgttcagtaatatcttgaactgcaagttgtccctctaacacagattgtgctattccttgtacagtccgtactatctcatcacgcccaccataattaatagctaattgtaaggttaggcctgtattattcttagttaatgcttcggaatcagaaataatcgtttgtaattcttctgaaagtccttgaatatatccaatgaaacgtatacgaacattatgttcatgcatatattgtacgtttttttgtaaatattctttaatcaaggccatcaaaagagaaacctcttgctcaggccgtttccagttctccgttgagaatccatatactgttaatgcttttacaccgatttcatcagcagcaataacaatttcttttaatacatcagcacctgctcgatgtcccattgaccgaggcatgccacgacgctttgcccaacgcccattgccatccataataatagctacgtgacgaggcacattgtgttcatctatattaactgtagatgaggtatggcgtttaaatagtttcctcagcatacattacctccagagtatgtccaaaatcacttgcaaccataggtctatatagaatgatatgaagcatatcctcagattcagtgattcttgcgacataatagccttcagaggctatctcaaaaaagcgattaaaattatcgcctattattaccttaaaaggaatatgggcagcctgcaattgagactttgcaagctgccaaggcattccaataagactactagaattagtcattatacttctaatacgtccttttctttaacggctttcagttcatcgatttgtttaatctttttatccgttaatttctgaatttgatctaaaccatctttagcatcatcttcagtaatcgttttagctttttcttctttttttaatgcatcattagcatcacgacgaatgttacgaactgctacttttgcatcttcagctttcttatgaactactttaacaatttctttacgacgttcttctgttaattgaggaattgtcaaacgaatagccgtaccatcattacctgggtttaatcccaaatctgattgtaaaatagctttttcaatagcaccaatcatggatttatcccatggtgcaattaaaatcatacgaggttctggtacagaaatattagctacttgattaattggcgtaggagatccgtagtaatcaaccatcaccttatcaagtaatgcagtactagcacgaccggtacgaatagaagcaaattcatgctttaaagactcgatggacttattcatacgttcttcttgttgttgcattaattctcttaattccatagtggtttattctccgcgaacgatagtccctacttcttcaccttttgcagctttagtaatattaccaggaatatccatgctgaaaacgataatagggatattattgtctttacataatgtagtggatgtagaatccattacttttaattcttttgtaataatgtcattatatgttaattcatcaaatttaacggcattaggatttgtttttggatcagaatcatatacaccatcagcaaactttttagccatcaaaatggcatcagcttcaatttctgcagcgcgcaatgcagctgttgtatcagtggagaaataaggtttcccaaggcctgcgccaaagataacgatacgttttttctccaagtgacgaattgcacgacgacgaatataaggctctgcaatttcctgcatttcaatagctgtttgtacgcgagtatccacgccagcttgttctaatgcatcttgcaatgctaaggagttcatcactgttgccaacatgcccatatagtcagctgtagcacgatccataccttgattactaccagctaaccctctccataggttaccgccaccaacaacaatagcgatttctaaatcagtggattttgccaaagctgcgatttcttgtgcaaacttttcaactacatcagggttaataccaaaaccttgatcacccgctaatgcttcaccacttaacttcaaaacaatacgtttaaagtgtctctttgccatttgtatactcctctattgcaaaataagagaacacggtacggtgttctcttattatgtattaattatttaccaacagatgccattacttctgctacgaagtcatcttggcgtttttcaatgccttcgcccaaaccgtagcgaacaaaacgacgtacgttgatgttttcaccgatttttgcaatattttcattaatgatatcagtaactgttttgtcaccatctttaatgaacgcttgttctaataggcaattttctttatagaatttttcaatacggccattaaccattttttccaaaacagcttcaggttttggtttacggcctgctttaacatcttcttcagcttctgctttagcttgttccaacaatacttgtttttcatgttcgattacttcagcaggaacctcttcacggtttaagtatgtagggttaacagctgcgatttgcattgcgatgtcgcgtgccaagctttggaaatcatcagttttagcaacgaagtcagtttcgcagttaacttcaaccaaaacgccgatacgaccaccagcatgaatgtaagattgtactacaccttcagctgcaatacgaccagcttttttagctgcagcagccaaacctttttcacgaagaaggtcaaccgctttatcgatattaccgtcagtttcaactaatgctttttttgcatccatcatacctgcgccagtcatgtcgcgcaattcttttaccatagcagcagtaattgccattatttgttcctcctagtactaattaaggtaaggatatagtccttaccctaattatatatgttatagatttatctttcaaatgctaatcaattatgattaagtgctaacagaattattctgcagcttcagcattgccttcttcgaaggattcgccttgacgaccttcaagaacagcgtcagccattttaccagccaataattttacagcgcggatagcgtcatcatttgctgggattgggaattctacttcatctgggtcacagttagtgtcaactgttgcaacaactggaatacccaattttttagcttctgcaatagcgattttttcttttttaggatcaactacgaaaagagcacctggcattttaggcatatctttgataccgccaagatatttttccaatttttccatttcatgacgaagaccgataacttcttttttaggcaatacttcgaaagtaccatcttctgccatagcttccaattgttttaaacgtttaatacgagtttcaattgttttgaagttagtcaacataccgcccaaccaacgttcgttaacgaagaacatgttagcacggatagcttcttctttaatagcttcttgagcttgttttttagtacctacgaacaagattacttcgccttgggaagcaacttcacgtaagaaattgtaagcttcttctacttttttaactgttttagacaagtcaatgatataaataccattgcgttcagtgaagatgaatttcgccattttagggttccatcttctagtctgatgaccaaagtgtacaccagcctctaataattgtttcattgatacaactgccattgtggcacctcctgttaattaacctccgccgcttcatccttcgggtcacccaaaattaggcacagtaccgaagtccactgacgtgcatatttttcatacttagtaattttaacaaaaaaatattctaaaagcaagtaaagagtcagtaattacaaaagaattactgactctttatagcatagtatatatctacaataaaagacttatgatttttactcgaatctagatatattttatattagttattacgtattgcttcgatcatcttcgctctatcaagagctccaaatacagcagatccagcaactaacatagtggcacctgcatccttaattggaatgcaagtaatatcgttaataccaccatcaacctctataacagcatcattattaccagctgaatccaataaaagtttcgcttgttttactttttctacagcccgtggaataaaggattgtcctccaaatccgggattgacggacatgattaaaatcatatccaagtctccagccacatcttctaacatcgaaactggagtccctgggttgagcgcaacccctgctttcataccagcggatttaatctgctgtatcaatcggtgcatatgaggaactgtttcttgatgaaaggtaaagtactcaacaccaatttttgcatattcttcaacataatcagccggattagtgaccatcaaatgtacatcaaaaggcaatgcagtatgtgggcggatagcttttacaataggtccgccaaatgtaagattaggcacgaaatgtccatccataacatcgatatgaagataatcagcaccagcaagttcaacacttttaatttcatcacgcaatattgaaaaatctgcggataacatagatggagctattttaatcattttaaaacctctttctttggttttgtatatcttttcgaatattcgtgtacgcatcatagcgactttcaaaaattttatgatttgccaaagcctccttgataccacaaattggttcatgctcatgataacaaggattaaatttacaagcttctacataatcagaaaattcagggaatagtgtaggtaatcgttctaatgtaatatcagtaaattcaatagaactaaagccaggtgtatccatgataaatgaatcagcatttaaactaaacaatgaggcatgacgtgttgtatgcttcccacgtttaatcttatcgcttatctcacccgtctggaatgcaaatttttcatccactgcatttaagagactacttttaccaacaccggaaggtcctgcaaaagcagtaatcttgtgttgcaaatgattgcgtaattcatcaataccgatatgatttatggccgatgtagtgataacatgatatccaatcgatttgtacttatcgattaatacatctgtcgatgcatcaccgacatcatacttatttatgcacaaaatgaccggtatatcagcatgttcaatcattactaacattttatcgagtaataactcattaatgtcaggattatgagaagcaacaacaaggataacttggtcgatattagcgacagcaggacgtatcattgaattgtgacgtggcaagatagtctcaacgaatccgtcttctgaaaactctacacgatcacctacaagcaaactatatttcgactttttaatacgtccccgcaccttacattcatgaatggttccaaattcatcttgaatataaaagtaaccattcatatttttaattacaatacctgtactcatacggcctctacaacgcagtatcttgaactaatgcaccatttaggtacacctgtattcgaacattgcccacaccagatacattttttacgatacggtcaccaggtttatttgtatcatcgtatataacggaagatccatcatcatcctttacgacaattttgacttcttgatttttagaaccagacggaacagttatatcgacagtccctttcgttctattagaagagctttgcttagagtcgtcttttttggaagaatctccctttaattcagtagctaagtttaagctactaccttcagaaacctcttcaccagcttttatactttgttctgtaacaattgatttatcatctactgaaccagcaatctgattaacaccaatattgttagagctcaatacttggcgagcatctttcaaggtcataccaacgagatctggcattttaaccttcttagcttgtgctttatttacaactaaatccacagtagtgcctttggataccttggaatcaccagaaggactttgtgcaactataacattatcaggttttccttcaacagatccttgtgagattttacccacaactaagcctaaatctttaagacgttgacgtgcttgatctacagtcaaaccagaaagatcaggaactgtaatatcaccaacacctttagatacgactaaatgtatagtacgctgttccttaactttttccccagcaccagggctttgagaaataacttgtcctgctggaacatctgtattagttacctcacttgtcgatactcgtaagtgtttatcttccaaaatatttttggccacagagacttgtttacctactacatttggtacatcaacagtggtattactccaaaaattaccataactcaagaatgcacctaaaaatgcaatcaagaaaataacggcagcaccaaaaactatatatttttgtggtatagatgcaatcttactaagcatagatttctttttttcctcattaggcgtaggatcatcgatatcactgaaatcatctaatgtatctggatctacagccggaatcatttgtgtcgcaaaatcgtatggttcatgacgttgtgtttttcccatcgtaaagccttgagataaacgtaagtcccccatcatttcagatatggaatcaaatcgatcagtaggatttttagctaatgctttcatcacaaccgcttctaacaatggtggtatagaaggattatatcttgtaggtggaatgaccttttctcgtacatgttttaatgctactgcaattggtgtttctccttcaaaaggaaccttgccagttaacatttcatataaaacgacacctaaggaataaatatctgtatttccatcgacaggttttccactagcttgttctggtgaaagataatgagcagaccccattatagaatttgtgtacataacagtgttagtggtattcatagcacgtgcaataccaaaatcagtcacctttacacgacctgtatttgtaataattacattatgtggtttgatatcgcaatgaacaattcccattgcatgggcatgttctaagccctcaccgatagcaatagtaatcttaacagcttcgtcaatggataatcgatgatgacgggtaatatattctttaagtgtttctccgtctacatattccataatgatataatgcatgccttgatcatagcctacatcatacatattcacgatattagggtgatttaacttgcctgcagcctgcgcttctcgtttaaatcgacttacaaattcatcgtcactagcaaagtttgaatgtaaaatttttatggctactggacggcctaataaagtatcttcacctttatatacgtcggccattccgccaacaccaatcttggtcaggatacgatagcgattatccagcaatgtatctttaatcttcataatatttataactctccatatctagattagatagttcctactataatggtaacattatcaccggcaccagcatcatatacatcagcaatcaatgtatttaatacctctgtattatcatcaatatgatgtaatacttctcgtattctctcatcgctaatatacccagataatccatctgtacataatagaattcgatcaccggattttacaggtagtgtaccactatcgacatgtaaatcttcttcaacaccgacggctctagttaataaattacgttgcgggtgtacaatcatctcttcttttgtaatttcaccagcatctaataactgttgaaccatagagtgatccgtggtaatttgcgtcaattcatcatttctataaatatagagtctactgtcgccgacactagcccaaagtagattatcatctaccttagcaaccacaacagcagtagttcccattccactaagccgttcctctcgtgccacacgattaactatgcgtgtattcgcatgtaatatagcatcaactaaggacgtttcattaatggtaggagtagattgtaaatattcttttatttcatcaacagcataggtgctggcgatttctccgcctctatagcctcccatgccgtcagtaacagcacaaatattatcactaataaaaaagcgatcttcattctgttttctgactaatccaattttacttaaacctacgatattattcatgaatctcctctttccgaccgtgggctacttttaattgtccacatgcggcttgaatagcatcgcccatttctttacgaattgtaacagaaacgccataagaagcgacaatatccttaaatatgttcatatgtttactagaaggtttatacaaattaatatgttcattcccatttacaggaataagattgacatgacaattaggaaatgccttgccaatatttcctaactcatgagcttcctctaacgatacattaattgaatctattaaaatatattcaaatgttatacgtcgctgtgttttttcataataatattttacagcatctaaaacctcgtctaatttgtatcgagatccaacaggcataatcttacgacgtgtttcatctgttgtagcatgtaaagataacgctaatgtaatcggaagatcctcatctgccaatttataaatattaggaacccaaccacaggtagaaatagtcatttttctataactaatatcaaatgtcatagggtcgtgaataagttttaacgcctgcaatacattgtcataattttgtaatggttcaccagcgcccatgacaactaaagagtgaatatcttcttgttttaaagcactaaagagaacaacttgacctacaatttcaggaaccgataagtctctaaacaatcccccctgtgtagatgcgcaaaaaacacagcccatagcacatccaacttgggaggaaacacatacagagttaccataatgttgctccattagaacggcttcaattctgctgtgatcagcaagttccaataataatttctgtgtttttccgtcgggtgatacagattgagtaatcactttaggaatcgatactatgcaattagaatccaaccaatctctcaaggtcttagggaattgtgtcatatcttgaaatacaaaaatatgacgatgatatatgtaatcaatcaattgtttcgcacgaaatttttgaattttatgttcctcaaataacgcttgcaattcaactaacgatttacccaacaattcaatcatgagtgctcccattcaaagctaacaacttagttaagaaatacgttgcattttaaccataaagaaaccatccatatcatctgttggtggatatgttgtaatcataccactatttgacttaagtgggaaatcatccgccacaggaataatagaaaactccttatgtttctgcaaaaatgattcaactacctcttcgttttccttgtagtttaatgtacaagtggaatatattaaatagcctttttccttaactgtcatagcagcgcgttctaaaatggctaactgtaaagatggtaattctgaaagtatcgattcctgttttcgccaacgcatatctagtttcttttgaagaatacctaacccagagcaaggtgcatctacgagcacacgatcaaaatacgaattccatgaatctggtaattttgtagcatcctgtacttttgtatgcacaatagaagcacccaatcgttcagcatttgaattcataagttcaatcttatgttcatgtatatcacaactcattaatgaacctacattatccattaaagcagccatgtacatggatttaccacctggagcagcacagcaatctaatatacgctcaccaggttgcggatttacgagacgtgctactagcatagatgccttatccataaatgtaatataaccttttataaatgcctcagatttttcaaggctaccacgatggctattaatataaataatatcctcgtaattagaatcctgtgtaacagcccatccttgttcatttaacatagttaaacattgtggaatatcaataagaatcgtgttaatacgtgccgtcaatttaggctgttcattaaaccatgcacataaatcttctgttttgtcacgaccaaactcacttatccataaattgataagccaaagaggaatattgtaaatgaaagaaatagcttctatatcattaactgctaaatcttcaataccgatactatcttgttctcgtataacggatctcaatatggcatttacgaagccagatagacctcgtgttaatttcttcgctaatttaactgattcattaactgctgcactttccggtaccttatccatatagataatctgatatatacctagtcgtaaaatttctacgaccatagaggacaatttttttataggacgtttagcaaaatgtacgataatagcatctaaataattgcgtctacgcaccacaccgtatacaagttctgtaaagaagcgtctgtctaagtcagataaattatattttgaaatatagtcctgtaaaacaatattagcataggcgcccttacgattgatatcagataatgcctttacagccaataatcgtatattctgtttttgtccgtttttagcaatttcgttcatagttatccttatcaatcagtaactctacagcatctcgtaccttgttaatatcaacagtcgtattacaacaaggtccattagggcgttcatttaatactccgataacaggaataggaaatacatcagccataccacttgcaagatctcgttcacaagctatagcaataatcgctttaggttttgcttctttaactttcatacgagccaatgtaccaccagtgacaactataaattgacaaccatattcctttgcgattttcaataaccctcctacctgacagcgaccacattgcttacaattgtatacatcatgtgtcaccttatgaatacaggtgttctcttgaagacaatgaggtgttaatagaaggatacgttcaggaggtactttatataaattcataaccactagatgattaattaaatcaatcatagcttgacgtaattcatctttttgtatgcctatgaaagcctttcctagccctaatgataatgggaaaagtaaataaataaatcgattagctattcgtaaaactataggatgaatatatctaaaacctagagaagcaatagctagaacaaaccaaagtccccaaatacctaatattaagagtccacctatactttcactaataaaagctaagttgtatgatattctttctaatcctggccaaactatatacattgaaaagccgatgattattgaaatgaataaacaagatagagccgataattttaaatataatgggtatcttttgtaatatatattacacttcgtcaaatgcaataccacctttaatttggtgaccattaataaaatcttgggcactaatacgctttttattttctggttgtacctctgtaaggagaataaaaccttgatcaccagtcgacacaacaagtccctttgctgtatgcactatagttccaggaggtgcaaattctacaggaatctcattgttatttacaaaaattgtggtcatcttattgtttacagatgtattctcaaccatttgagcagaccatatctttaaccgtttcccctgtaagaaagaataacatccaggtgctggatttaaaccacgaatcaagttgacaatcttatgtgccggttgatgccaatcaataagccccatttcttttgtaatcttagaagtatggcttgctaaagcgtcatcttgaggggtggctgtaatttcacctttcacccatttatctaatacaggagaaatagtgcgagcccctaattcagcaatgcgctcaaataaagcgcctgttgtttcgtttggaagtatatcgatttctgcaatatcgataatatcccctgtatctaaaccatcatccatatgcataatggtaacccctgttttagtatcaccatttaaaatagcataatggataggtgctgcccccctatattttggcaatatagatgcatggatattaatacatccatatttaggcaaacgaataagccatggtggcaaaatcttaccgtaagcaattacgacgatcacgtctggtgcaagattaatcaattcctgttgaacagcatcatcacgtaatgttataggttgatatacgggcaaatccaaagataacgcagcttctttaactggtggcatttgaatctgcttgccacgtcccttttgtttatcaggttggcaatatacacctactatagagtgaccagccttaactaatgcgcgtaacgtaggaacagaaaaatctggcgtgcccataaatactatgcgtaatggattattgttagacaatttccttttcctccggatgatctgcaatacggcgtaagtttgtagctttttcaataaataaatgaccttctaaatgatctatttcatgttgaaaaattctagccaaaaaaccttcagctttaatcataacttttttattatgtggatcaataccttttacggtaaccttttcaaaacgttccacatttccgaaataacctggtacacttaaacagccttctagcccaatttgacttccttcaccatgaataatttcagggttgataagcgctattaatccactaccagcatgatcatcaacaactataatacgtttggatacattaacctgcggtgctgccaatccaacaccttccgttttatacattgtgtcggccatatcttctattaaagcacgcatttttttatttacatgttctacaggttctgcaacctcttttaatatgggatgtcccgcttttactacttcaagtactgccatatactcctcttatcaaatagggtctacatcgataagtagaccttcttgtgtaaaaatccaagaattatatatataatcttttacggcatctaaattttctccgcgaatcataatcgataaacgatacatatcgcgaatctttttaatgcctgcttcataaggaccattaacatcaatcgattgtgacttaaaatttgtttccaaatcatctacaattttttgagcaatcgattcagccatttcttccttcccatgtcttataaccatataaatcatttcgcgaaatggtggataccctaagtccttacgatttactatttcttcattgtaaaagcccaaataatcatgagccttactctttattatagcataatttaaaggattatatgtttgtataacaacactgccaaccttatcaccacgacccgctcgtcctgatgtttgcgttagtagatcaaatgcacgttcagatgctgaataaacaggtatatttaagacagaatcagccgtcaatatacctacagctgttacatccttaaaatcatgcccttttgaaaccatttgggtccctaataaaatatcatatttatggttaccaaaatcttgaagaatttcttcgcccatatctttatgcttagttacatcttgatctaaacgcgcaatacgagcgcctttaaaatgtcggcgtaattcttcttcaactttttgtgtgccagagccaaagaatttaattcttttactatgacatttagggcatactgaaggaattggttcatggtgctcacaatagtgacaccgcaactcttcaccggcttgatggtacaccatagcaacctcacaatgaggacacataatcgtttcaccacaatcacgacacatgacaaatgtgctgtagccacgacgatttaaaagaataatcatctgatttccatccgctaatgtacgctcaataagatgtgtcatagcatcggagaacaccgagtagttgccacgaatcatttcttctttcatatctacaatttgaacatgtggcatcggttgatcaaagatacgggttggcaactctaacagcttatattgtccttgtaaagccttgtaatacgatgtaatggcaggtgtagcagagcctaaaataacaggacaatcatgagccatacctctccataatgcgacattttttgcattataacgaatcatatcttcctgtttataagatgtatcatgttcttcatctaatacaataagcccaatatcttcagcaggcgcgaaaacggcagaacgagcgccaataatgatatggctatccttccttcgtatacgttcccagttattatttcgctcactaatggttagtttactatggaaaacaacaacttcatcaccaaaggtagaaacaaaacgacgaacaatctgatcggttaatataatttcaggaaccagaataatggcggttttaccttttcctatacaacgagcagcagcttttaaataaatttgtgttttaccactaccagttacaccatgcaaaaggaatgtattatacgattcaagatccatcatctgcttaatcggttcatatacaatttgttgtgcttcagttaacggaattgtttcttcaccactaagcaattcggtaaaagaagtttttgtatctttaaagcgttcttcaatatgaatgccatgctcttcaccgacctgtttaataaccatataagaatagcctttggctcttaataaagatttaggagccccacctacctcgatgagatagttagccaactcacgttgcttgcgcttcttaggacttaattgatcaatcttaaactctggcgttacaacaagccattcttcttttggtgcatcgtaagattttaatgttttatgcacagtaaaaagacgtaaagcatctccaaaggaacacaaaaaatatcgactaattttctgtgccgtatccatcatttcccgagtaaaccaaggatcactatcaagaatatctattatagaacgcaaagtaaatgttggtttctctaatagttcttcatacccaataacgatgccctcttcacgactaccacctaagggaactaatacacgagtccctgctttcacatcaccaaatttctctggtaacaaatagcttaacggtttatgtaattgtttggcaggtctattaataataatacttgctacgcgcattagttcacctcctctaatctaattattataacatatcctagaggagataaaaaaagacttagtagacaagtctactaagtctttactattataagccaacttcgtgacgtaaaatatcagctttatcagtacgttcccatggaagatcaacatcagttctaccaaaatgaccatacgcagccgtcttacgataatgaggctttaataaatcaagcatttcaatgatacctgctgggcgcaagtcgaaatgtttgcttactaattcttgaattttttcttctgcaatcttagcagtaccaaatgtatcaactaaaatggatacaggttttgcaacaccaatcgcatacgctacttgtacttcgcatttatctgcgagacctgcagctacaacatttttagctacgtaacgagctgcatatgctgcggaacggtcaaccttggaaggatccttaccagagaaagcaccgccaccatgacgagccataccaccatacgtatcaacgatgattttacgacctgttaaaccagcatcaccatgaggaccgccgataacgaaacggcctgtaggattaatgaaaaatttagtgttttcatcgatgaattctgcaggaagtgctgcatcgataacatagcgtttcaaatcatttttaatttgctcttgtgttacttctgggctatgttgcgtagaaataacgattgtatcaatacgtttaggttgattgtcaacatattctacagtaacttgtgttttaccatctggacgaagatatgttaatgtgccgttcttacgaacttctgctaaacgacgggataaacgatgtgctaaagaaattggcataggcatatattcaggtgtttcgtttgttgcgtaaccaaacatcatgccttggtcaccagcaccaattttatcattgatttcgctattaccatctttagattctaatgcttcgtctacacccatagcgatatctgcagattgttcatcaatagatactagcacaccacaagtgtcacaatcgaaaccatattttgcacgagtataaccaatttctcgaattgtatcacgtactacacgaggaatatcaacatatgtgcttgtagagatttcccctacgacatggactaaacctgtagtcacaagtgtttcacaagctacacgagcctttggatctttttcaataatcgcatccaaaacagcatcagaaatttggtcagctattttatctggatggccttccgtaacggattcagaagtaaaaaacatatgtttttctgccatttttgcctcctataataaaaaaatccctcatggtctctcatgagggagacccatctgtcagtctatgactgttggaattagcaccttcttttaaaaagggttgctgtagcttcaacgggcctttccctccactactcttgatgagttaaattatgatataaattgtataccttttttgtagaaaaatcaagttaattcactttatgataacaggcgctggtatatatctaatcacattgcctagattagctatgctcatcaataatagcagtatatataccagcttgcggtataacaccactagctatagcaaacgccatagccaatggtaatgcgactacacctacaaactatagacaacattacataagctattttacagctaacaattcaataacttctccaataatgtatctagccaattctgatttttgcatatttggcattattttaggctctttattaggatataaaaaatagccttcattcgtatctacattaaacccagcatttgatttgcttacatcattagctactaacatatcaaggtttttgcgacgtactttatccatgccgtaatcgacaacatgttctgtttctgcagcgaaaccaaccaataattgatgggttttatgctctcccagtcctttaagtatatccggattctttacgagatctaaagtcatagattccatttttttgattttttgaggcgctttattagccaccctaaaatctgaaacagccgcagccattatcaccacatctgttgattcgtaataggaattaacagcctcctgcatagattccgcagaatctacaggtacatactcaacacctttaggaatctctaatgatgtaggggcactcactagaattacgcgagccttttccttaacagcagcagctgcaatggcatatcccatctttccactagatctgttacctatatatctaacagggtcaatattttcttgtgttccaccagctgtaacaagaatagtcttaccagctaatttaccagtcccatctagagaatgtaattcttctgtcaaccaattaacaatctcttctggtgctggtagtctacccacacctgttacgccacaagctagccaaccagcatcgggttgcataatatggtatcccaaagatgataaatcctttaaatttctctgtacaataggattattgaacatctctgtattcatagcaggacataaaaatttaggtgctggcgttgccataattgttgtagtgagcatatcatcggcaataccagctcgtattttaccaattacattagctgtagctggtaccacaatataggcatcagcccaggttgcaagagcaatatgttctacattccaatcgtggatttcttcccacatatcaacagctacaggatgaccactaatttcaccaaatgtcataggtgtcgcaatatgagtagcatttttcgtcattactactttgacctctgccccagcttttcgcaaacgacttaccacttcaattgctttatatgcagcaatacctgctgaaacacctacgataatatgtttccctttcataattctccttttaaaaattccttgtacaaaatgtacaaggaattttgagtaaaattatttaataccttctttagtgcgtttatatgttacttcaccttcagcaatctcatagaatgctaaagatacaggtttatctgtattatgaatatctgtagcaagacattcttcaccatcggtcaactcgcgagcgcgtttagctgctagcgttaccaatgtatatttactatctacacgtttttccaatgctttcaatggaggttttaccatcatactatcacttctccttagactcttgatattgcttataaatatattgaatttgctctttattacgactgattttacaagcttcagcacgcaatatagaagcaacctttaaagacgcatcctctaaatcatcattgaccacaatataatcataacgatgagctaatgctaactcagaacatgccaatgataaacgcttatcgataacctcttttgcatcagttcctcgattatgaagacgttcagataattcggttaaagacggtggcacaatataaataaatacggcatcactaaatcgctctttaacttgcatagcaccttgaatatcgatttcaagaagtacactcttcccttcatccaacaaattcatcacatgttgttttggagtaccataataattatcatataccttagcatactctaaaaatgcatcttctgacaataatgattcaaattcttcttttgtgcggaagaaataattaattccttccttttctccaacccgcggttcacgtgtggtcatagatacagaatatacaagattaggcatttcacctcgtatattagaacaaatcgttcccttgcctgcaccagatgggccggagataacaattaataaacctcgatctgccatattaactcctaagcttctacagtatcttcatcgacttcgtgttgcacaatacgatgtgccaccgtttcaggttgaatagctgacaaaacgatttgcccactatccataacgagcacagcccgagttttacgtccataggttgcatctatgaggagacttttatctcttgcatcttgaaccatgcgtttaataggtgcagattcaggactaataatagcgataacgcgattagcagaaaccatattaccaaaaccaatgtttagtaattggatactcataaatagacctccttactcaatattctgtacttgttctctaactttttctaattcacattttaattgtaccacatagtctgtcagtgttatatccatcgcttttgagccaatcgtattaacctcacgattcatctcttgaatgataaaatctaacttacgaccaatcggttcatccatcttaagtgtatttgttaattgtaccacatgagacctaaatcggacaatctcttccgtaatatcagttttgtcagccataatagcaacttcttgtagtaaacgatcttcattggcagtaatgtcaagaccttccacatagtccatcattttagttcgcaaattttctttataagcaataacagcatcggctttatgactgttaatgtcttctataatatttgtcatttgtgaaagccggtgtaacaaatcttgttgaatatgaatcccctcagattgtcgcatactgactaatgcattaagtgcattagttgtagtatcagtaactaaagactgaagtacatcttctgtaacttcagaatcttgaatttgtacccaatcattggatatggccatcactgccgataaaggtacctcttgaggctccctataaaatccttctgataccagtaagtcttgaatttgatgttttaaagaactatttattatgaactgtttttctctatccgctacatcctgcaatgttacaaacacatcaactttacctcgatgtattgttttttgtatacatttacggatactatgctctacagaattaacttgtttaggacttcgtatgttgagatctaaaaatctagaattaacagatttaatttctatgatacattgtaaaccatctacaatttgagttgctcgcccaaatcccgtcatgctattcatggaagaacctcctttttatatattgtatcacgaattttaaagatatctattaattatctatgttatactaaactatacattgtgagttaccaaatgaaaggatcaccatgaatttagacggattaaccatgtctgtattggcaagagaattaaatgaaagcctacagagtggacaaatacaaaaactttatcaagtagataaacactcattactttttaaagtacgtaatgctaatcaagacgtaaatctgatgataactgtaggtgccaatcccgcaatatatatatgtaaacctatccaagatttacccaaagaacctagttcattatgtatgtttctacgcaaacatatagagggcagtcgtattacatctgtagaacaaattaacggagatcgtatcctctgtatccatattgataagcttgaaatggatggttccatcacctcaacatcgatatatattgaacttatggggaaatattctaactgtatctttgtgcaaaatgatatcattttagaatctattattcatgtatcaccaataatgaacagagaacgttcagtaggtcctaagatggcatatgaattaccacctaattctaatcgtgtatctttactagattttaatgaggaagaaatattaaatattcttacatcctttggctctggtacagtcactaatactatacgctctgtctttaatggatttggtaaatcactattagattatgttctaacattatctaattttgatggcaccgaagaactaaaagccttatcagatgatgcaattcaaaaattatcaggggctctagaaactttaaaagaaaaattattaaacgctaatcaattatatgtctataaaaatgaaaatggtaaaaaaatatatatgccatttccaatggaaacggattgtacattaatagaaacgtatccaaccatctcaaaagcaatagaacagtctatcgctgacactggttcaattcatacggctgacaaggaattggagcgtattatagctaatgctataaaaaaagaagagttacgtcacaaaaagattaaagatgaactagatgatactaaaaagatggaaacctataaattatatggtgatcttttgatgattaatagtcatatacaagctcactatcaatcttctattgacgtacaaaatttactttcagaatcagcagaaactataacaattcccttaaaacctgaattgaccattgtggaaaatggacaatggtattacaaactatatacaaaattaaagaatcggattattagtggccaataccaactagaccaaagtacgataaaattagaatattatagaacaatcttatacagtttatctttagccacaactagagaatcactagaagaaatacgccatgaatgtatggatgcaggcattattaagaaatctaaaaaacctctctcctataaattgggaaaatcgaattacattcatcttgaaatcccagaaggcgagctttatatcggacgaaataaccagcaaaatgaatacttaactcatcgttttgcaaaaccaaatgatctgtggtttcatacacaggatattcaaggttcccatcttattttacgtacgaatcatgaacctgatgatatgctcatttcacaagtagcaaaatatgctgcctattttagcaaggcccgtcattcatcaaaggttcctgtagactatacatatataaaaaatatcaaaaaaccacctaaatcacctttaggatttgtcatttttaacactcatcaaacaatgattgttgaaccagaaaaaccacctatgtatgaggaataacaaaacccccgatagatacatatcgggggttttctctgcaatcattagcattaactatactgattacaatatattattgattatcagttttttgttcactttgttgcaagctttcgcggttttgacgaaggctttccaacgttttttctaaattgttttctacatatttcaatacatcaccagcatattgaatagagctagattttaactcttcagaagattggtttgcagcattgataatttgattagcttgttcttgtgcttgcttaacaagttcactttcagcagtcaatttagcaatgtaatctttagcttgatcgattaatgtttcagcttgacgttgagcatcagccaatactttatctttttcggccacaatacgacgagattcatcgagctcaagtggtaaagattcttgaattgcatcgataatacgcataatttcatcttcttcaaccatgcgttttgtagtcataggaatacggctgctagattcaataagaacctctaaatcttcaagtaatttttctgttttcatacaattcactcctattatttattaccatcgatgttaaaacgtttttctaattttatctttacatcgtcaggaacaagtccatctaacttaccaccaaatttagctaactcacgaatccctgttgagcttacaaaagaatatttattattggtcataataaacactgtttcaatatcatcatccaagtattttgcaaatagagcacgttgaaattcatattcaaaatcactaagagctctaagtccacgaataataatacttgcatttttggatttaacataatcgatgagcaatccacctgtacagtcgatttctacattagaaatatgcttaaccgcattgcgaatcatctcaacgcgttcttccatagtaaacaatgaattcttattaggatttgaacttacagcgataatcaacttatctacgagacgactaccgcgctcaaaaatgtcaacgtgaccatttgtaacggggtcaaaacttcctgggcaaactcctatccgcaagggtctaactcctttcactatgtttcacaaaatatgaaacaagggtgtaaccaaatttttgttcctttatacattcccattctggtggcatggtgaaagcctcatctttatgatgttccaagactaaaacaccatcatcagctaatgcatcatgagccacaacaaaatcaatagtctcctgtataaagccattttcatatggtggatcagaaaaaatataatcgaactgctggtcacctataaaatgtttcaattgtgaaagtttcttaggtatgatttgaattcgatccaacacacgacaatgttccgcattctctcgaattaatttaccagtgcgataatcaacagcaatcgctgattcagctccacgactgagcgcttcaatggcaactgcaccagtaccagaaaataaatctaatacacgagtgccatatataccgcgatgcgctaatacgttgaagatactttcacgaacacgatccaaggtgggacgtgtatccatccccttcggagcttttatagtatggccctttgcagtgcctccgataattcgcatacaatcctcactagattatactcattaattatagtatataaatacctaaaataaaagtatcttttacaattatgatacttcgattttactatctcggcccatcaattcttgcaatgctaattgaggggacttctcttcatataatacctcatatagtgattgtgtgataggcatttctacatggtgttttatagccatgtcacgaataatagatgttgcaaaaaatccttctaccaccatattcgtatgattcataatgtagtccattgttttaccatctgctagctgttgtcctgcagcacggttacgactatgctggctcatacaagtagcgattaaatcccccataccagctaagcctgcataagtttcttttcttgcaccgagagctaaaccaaatcgagtcatttcatgtagaccacgagttagtaataaagccttacaattatctccaagagacaatccatcaacgataccagcagccaaggctattacattttttgtagcccctgctaattcaacaccaatataatcgtcactcgtatatatacgaaattctttgctgtgtaatgcctgttgtacctttttacctatgtccatagatatcgtacctactacggctgcagcaggtaagtttctaccaatttcctcagcgtgattaggaccggataaaacagttaaatggcatccgacagaggataattcctccttcatgactgtagtcaataacttaccactttcccgttctacacctttagagcataacacgtatatttgatctttgtgagcatatctttttaaattctgtaaagctgtgcgcacatgaatagatggtgtaacaatcaatacaatatcagcctgctcaatagatgtttgtaaatcagaactaatgatgagttcttcaggcaatataacaccagctaaatatgacttattttccctgtacttaataagttcatccttaaactctgaacgtctgcaatataaggttgtatcatttccggccactacagatttaatagcaagagctgtcccccaactaccagatccgacgatgcaaactttcatattactctccttttttaacgcgttctacctttaattctttaccagctagtaaacgagaaatattttctcgatgacgtatgataacaaacaatgcagctagcgcaccaaatcctacaaaccaccaggattcacccattacatacatcaatacaggaacaagcgcagccgctactatagaacctagagagactaatttagtgaaatatacaatgatgccccaaatagcaaaacaaataactgcaactattggagataatgcaatgagtacccccaaaccagttgcaacaccacggccacctttaaagccaagaaatacagaccaattgtgtccaaccatggccaaaatgccacctagaatcatgtacatgggatttaaatgggaaaacaaaaataccccaatggcaccctttaatgcatcacagaaaaatacaggaagcgctgcctttaaaccaataacacgatatgtatttgtagcacctatattttttgatccatatagacggacatctgtattgaaaaataatttaccaataatgagtccgctaggaattgaaccgattacataggctaataacgcataccctataataggcataaaatcattcacacctttcacccttaccctttgtacttattactcttcatcttcacgttttttaccgcgaagaattaatcgaattggagtaccttcgaaaccaaaactttcacgtaaacgattttccaagaaacgcatatacgagaaatgaattaattcgggttcatttacaaataggataaatgttggaggtttaacactggcttgtgtcatatagtaaatttttggaattctaccattacgggatggaactggatttacagtttgagcatcttgtagtaattgatttaatgtaccagtagaaacacgacgatattgttgttctgatacgaatttaagcatatccgccaaacgatgaatacgttgttttgtcaatgcagaagcaaatagaattggtgcaaattgtaagaatcctaattcatcataaatatcttcagtgtatctcaatgtagttttatcatctttttctacaaggtcccacttattaactacaatgataacgcccttgccagcttcatacgcataaccggcaatttttttatcttgttctgtaacgccatcaacaccatctaatacaagtacaacaatatcagagcgatcaacggaacgaagagagcgaacaatgctgtaacgttcaacagcttcatcaatcttggatttacgtctcatccctgccgtatcgatgagaacgaatttttgatcaccatgtgtccaatgcgtatcaatagaatcacgagtagtgccagctacatcggaaacgataacgcgatcttggcctaatagtgcattggtcaatgatgatttacctacattaggtctaccgatgatggccacatgaatggtatcttcctcatctacattagttcctacaggtgggaaatgtttaaccgtatcatctaataaatcacctagattcattaaattctttgcagaaatgccaattggatcaccaagtcccaaattataaaactcataaatattaggttcttgatttacactgtcaattttattcactacaaggactactggttttccactagtacgtaaaatattggccacttcttcatcagccggtacaataccttgcttgccatcaaccacaaagaggattacatcagcttcttcaatagcgagttcagcttgtaaacgcatcattttaggaataacatggctgttctctgttacaaactcgataccacctgtatcaatcattgtaaactcacgattaagccattctgcatcgaagtaaattctatctcgtgtaacgccaggtatatcctcgacgatagaaattcgtttattaacaatggcattaaataatgtagatttacctacatttggacgaccaactacggccactaatggttttgccatactttcacctcttttattatctatatacatcacttcattttatcatattaaagggaatgtacgcaaaaaggctaatcaaggaaaaccttgattagcctcattaaaagattctgaattattcagcgtcttcttctgtttcttttgcttccatcaactcagtcaaagccaagcccaatttcttttcatctttgttaagagaaatgattttaacttcaacttcttgaccacggttcaagtaatcttcaactttcgcattacgttgttttgtaatttgagagatgtgaagtaaaccttgaatatcatcgttaacagctacaaatgcaccataagctaccaaacgaacaactttaccagtgattacatcaccaacgtgtaaagtttcttcagcaacatcccatgggctcttagttaaagcttttaaggacaaggataatttgttgctttcagggtcgaaggattgcaatttaacttcgatttcttggccaacggaaagaacatcttccacttttttaattttttgccaagaaatgtcggaaatatgaagtaaaccttcaataccaccgatatctacgaatgcaccataaggcatgattttacgaacgatacctttatagttttcaccaacgttgatatttttcaatgcttcagctaattttgcttgacgttccacttcaagtactgcacggcgggaaagaaccaaacggtttttcttttcgtcgatttcaagaacttttgcttcgaattcagtaccaaccaagttgtccaaagattttacgaaatgcacatcaccttgggacaatggaatgaaaccacgaagggattttactgttaccaccaagccagctgggatagcatcgatacctttacatacgataggttcgtctttttcttgagcttcgataacatattgccaatcttcatctttagccaaacgagtcatggaaagataaataggattatcttctttgatgtggttcatgataactgctttaatttcatcaccatttttcaacacatctttggcagagtttggtgctggataagaaatttcagttctattcaaaattgcttcagttttgtagccaaaagatacccatgcgcgttcatcttcaacttgtactacttgaccttctacaacgtttcctttcttaaattcttcttgaccttctgctgctaataattctgcaaaatctttcattgtctcaatgacctccttaataatccagtcgggagtcgacgctcctgctgttactcctaccgtctgtactcggttaaaccattccagttgtaattcagtagaagtttcaatgtgatatgttgtacatccaacgtctcgacaaacctctgccaatcgattcgtattaccgctgttcttaccacctatcacaatcataagatctacgttacgagctaattcaacggcagaattctgacgttcctgagttgcattgcatatcgttttgaaaatcttaagattcttagattttttctctaatatctctattatactgttaaatttgaattgtgaaaaggtcgtttgaacaactacacccattttttcaacaacttgtagatttttggcggattcttcatcttcgatgattattcctttgttattcgcccataaattaatacttttaacctcaggatggtttttttcacccaatataaccaatgtcatactatcttcgataacagattttgcatcttgttgagcttttttcacatgtggacaagtggcatccaaaatgtttaagcctttctcttctgcttcttcgtaaattgcagggcccacaccatgagaccgaataatcatcgttccttcatcaatatccgacacctcttgaatcgggctaacacctttactctctaaacgaccaactacttgtgggttatgaatgataggacccaatgtatagctttttccatcactatcagcagcttcattggccatttcaacagctcgttttacgccataacaaaagccatgattttcagctaaaattatttccataatgtctcctctatgcgattttcatgataggaatcaatcatgcgttgaatttcaccctttacgcgatcattaacctctttaatagcctcaggtgtcggtttagttttactaacaggtacctgtttaccaatgatgcaagcaacttggtttctcttcatattatgagaaccgataatggcaactggggtaataccaattcctgtacgcaacgcaatggatgcggccccatcatgaaagcgtcctaatttaccattcttttgacgattaccttctgcaaaaattcctaatactttattattctttaatagtcctaaagcatgacgaattgctattttatctatagctccacgatttaaagggaatgcaccaagccaggtacaaaaaaatcttgaaattggatttacaaataattcctgttttgccataaagtgtacgtgcctaggcaatgcatagccgcaaataggtggatcgttattacttaaatgatttggcaccacaataaccggaccttccatagggaaattatcgcgaccataaacctttaatccatagccgactttatagcgcaaccaaaaggcagttcgccaaagccaagtagaaaatttgttcatttagattcgctcctgtactagatgtaatatatgttctacagtttcatcaaatgtcatttcgctagaatcgaccaatacagcatcctctacctgaatcaatggagattcctttcgattcttatccatatcatcacgttgcataacactgtctttaatatcctctaaagtttgttcgttaactgtacccttcacttctaagtaacggcgcatagcacgagcctctacagaagcggttagatatatttttaattccgcattaggtaatacaacggaaccaatatcacgtccatccaatataacgccaccagcttctgccataagtcgttgtcgttcaaccaaatattgacgcacacctttatatgaagccactatagatacagcattgttcacttgtggcgttctgataaaatcagtcacatcttgaccagcaataaaaaccttacatgaatcatcactggcctccatagtaagatctaattctggtaataatgcttccactgccttttgattatttacatcaatatgattatgcaatacagcccatgtaacagaacggtacatagcacctgtatcgatataaagatatcccagtttttttgccactattttagaaatagatgattttccagcgcctgctgggccgtcaacagcaacggcaattttatgtgtattcataattccctgtatcactttcacaaattatataaaatatactattcaatcatacagcgtaaaatgtctctattaaaacgcctcagggtgagttatatgcatagctgctacaaatcctgtggaaaaggcagcctgtagattatatccacctgtaaaagcatcaatatccaatacttcacctgcaccatataaacctttaaccaacttagattccatggttttaggattaaattctttaagggaaatgccaccagcagtaacaattgcctcttctacaggacgtaatcctttcacggtaagaggcatatgttgcaacatataaccgatttgttgtcgttcttcctttgaaatctgattaatcggtttttgtggatcaataccggccaattcaataattaatggtatcaatcgacttggtaacaaatctttcatcccattaattaattgtttcttagaatagagatcaaaatctttttgtaatcgtttatctaatgtctctggagataatgcaggttttaaattgatatctaaacctataatgccgatattttttttgcgcatcaattttcccaccgtatgactaagggataaaacgataggaccggtaatgccaaaatgggtaaacatcatttccccaaacatcttggcttgtaccttattcttagcaaccacagacaattcaacattccgtaggctaagccccattaaatcttttacccaggactcttccgttacaatcggtactaaagatggacggatatcggtaattgtatggcctacttgagccgccaacatatatccatcaccagtagaaccggtagcaggatatgatttacctcccgtagcaataaccacggcatcagcgtgataggtttctctgtctgtcacaacaccggtgacaacaccatcatcaactaaaagtttcttaactggttcctcaagatgaacatctacaccatagtgtttcataagcttcataaaggtatttcgcacatccagagcggaatctgaagctggaaatacgcggccgcctcgttctaccttggtttctaaaccagcgtcgtgtaataactgcaacaaatcttcattggtaaagcgctcgtaagcaccatataaaaacttaccattgcccggtgtatttttaataaaatcagacatatcacaagcattcgtaatattgcagcgtcctttgccggtaatgcccatctttttaccaacataattcattttttcgagaagcgttacctttgccccttctcgaccagcaatgacagcagccattagccctgctgcaccacctccgattacaacgacgcgcttcatttagaagctcctagcgctttaagtgcacttacttcacgttgtgtcaattgacgaacaccaccgcgcttaacaccacttaatgttaatccaccataagcaatacgttttaaattatgaattcggtaaccaaaatgttcaaacatacgacgtacttgtcgattacgaccttcatgaatagtaatttctacttcgtgaaccccattgtggtcatcaaatcctaaatctacaagtgtagcaggtgctgtcacaccatcttcaagaggcacaccatcggcgataacctgtaaatctgtatcatttacacgccccttaatacgaacttcatatgtcttttcaacgcctttagatggatgtgtaagattctgagctagttctccatcatttgttaaaagcaataaaccttccgtatgtaaatcaagtcgtccaattggatagatacggcgtttttcatttttaatataatccattacagtttcccgtccttgtgggtctgtaacagatgtaataacacctttcggtttattcattaaataatacacaggtttttccacggctaataattgtccatcaaccatgaccttatctttcataggatcaaccttaacacccagttccgtcactttacgtccattgacacgtaccttaccagacgcaattaattcttctgccttacgacgagaagctacaccacagctggcgataaatttttgtaatcgttccatattatatccttttctatatgttctctgttccatcctcattaggagattctattaagctttcgtctttcacactgtctattgatacacctgacatatcagactctgcagtatctagctctttgtgcaaatcatcaattgaagtaacacctgtacttcgcagaaattcatcagttgtgccatacagaatagggcgacctaccgtatccttatgacctaactcagcaattaatgagcgagacaataattgtttaattaccttgtcactattaacaccgcgtacctcttcaatttcagcttttgtaattggttgtttatatgcaataaccgctagtgtttccatagctgcattagataatttatcctcttttttacgtatatgaccaatatacatagccgattctggtgcacttaccagttccacaccagcagcagagattcgcacgcggataccgcgtttatgggattctaaatcagatgctaagtgatctatcaatgtcaagctatcttgttttgaaagcttaaatatatcttgaatgacatcaatagaaataggtttagccgcagaaaacaatactgcttctaaatctgatatacccatgctactcctcctctacttgtacatcccgttcaccaatgataggtgcggtaaaaataatatcatcattttcgtaaaacatgactaattcttgttgttttaaaagttctagcacagccatgaatatagttaccataccacttttagattctatagcaacaagtagctcacgaaacgccaatcgttcaccacgccttgcacgactcgctaaggatacgatcatatcctctaagctatatgcatctttctcaacagttacttgacgaaccggttgttcatcttcagattcaacggtcttatgtaatacagaatagaatatatcatataatttagatagttctaaattataataactatctaaacctaatacactcgtttcctcagggcgactaaacacatttgactcaaccgatgctttttccattaatagctgagtaaaatcttttatcattttaaactctactaacttagccactaattcatcacgtggatcttcgctttcatctggttccggttcaaccttaggtaatagcatacgggacttaatttgtaataatgtagatgccattacaaggaattcactactataatggatatcaaaatgattccaattatctaggtattctaaatactgacttgtgatttcaacgattgggatatccgtgatttcaattttatgtttttcaattaaatgtaaaagtaaatcgagaggtccctcgaatacatccaatttataattatagtcccccatgaatccccattccttaacgatactatttcataactatataattatatcgtaaatcgaaaatttcttctacgttcaccatatataattgtattttttagtattctttgttatcttataatgtgaagaaaattatatatttgttgtaatctcctttagaaaggatacattatgttgtcatcaatgaaatcattgattcaaaatcctattttgcgctttggcattataggcatagtgctctacattgcactattttttatttatgaacctatcacattaggacttgatgtagaggatattacaatccttgcggtaccgaccatggttggtatgtttttattccaatactttatgagttgtaccgtatttcatcgtgcgttcttaggatatggtttagtaggcttactatggggactcacatttccattattatttcattggtcttatgtaaaacctctatatttctatgagtttgccaatgattttctattcggcttacttctatttatggggctttcaggtatccaatatttggtaacccaaacgggacgtctacagaaattaacatcagctatactagctttattctcttcgttccttagtcttattccattattacaaattggttattatatgaccacctggcactgtttaacaccagcaagcctattggccgtatacatgacaaatcctgaagaagcctttggattcttaaaaaatgctgctggtattcccggccttatcgctatcgtcataggccttattttatggacactctttctatattggtgcaaccttggtatgaaacgagttgtcgattttaatacaacacgtcctttgcgattaggtgtactcatcgcatccatggtagcatttatcgtatatgtaccattcttcttatttcctcaaacatgcatcgtagccaattggacggctgctggtaattatgttaaagaaatgcaacaatacaacgataatcaccatcttgtatttgattcattcaatttggatacaaaggatacgacacctactaaaacgcctggaactatcattctcgttatcggcgaatccagttcccgtgattatatgaaggtctataatccaaaattccaatacgatgacacaccttggcaagaggatatgcgcgatcacaataaagattttatcttctttaatcatgcgtactcttcctacgtacaaacagtaccaaccttagaacgtgccctttcagagcgcaatcaatataacgaccgaccattcttagattctgctaatattttggatgtagctaaaaaagcaggttacaccacatcgtggttcagtaaccaaggcgtatttggcgaatacgatacagctatttctttgatggctaaaacggcggatactacaaagtgggctcacgaatcctatggcttctctgatttatatgatgaagcattattgccattgttaaaaacagctgatccaagtaaaaataattttatcgtaattcatattatgggcagtcatatttattataatgaccgctatccgcatgaattcagtaaatggaaaaaaggtcccaatcctgaaggtatcgaggcttatgctaatagtcagctctatacagattggttgttacaacaaatctacacctatggtaaagataatttaaatcttcaagctatggtttatttctctgatcatggtgaaagcgttgacaagtcccacaatccagacacctttgattttgtgatgactcacattccattctggatgtacttatcgcctcaatatcgtgcagcatatcctcaaacggtatcagcactcgatagtcatgaacatcaatatttcacaaatgatttattatacgatacattagttggtctcatgcatgcaccaaacagtcgttacgataaaacaagagactttagtaatagtgcttatcgatttaatttacacaatttaacaacactattaggtgaacagccattaacaaatgacccagttaatgcaggtcaataacatacactaatacaacaatagcgacgattgatacatatcaatcgtcgctattgtactttataaggtcctgtacattcttttctgtatagatttgtatattatgttgtaataaaagctcagacgtgacaccaaccccatttacgagggttctagtaaatgtaccatcatatatttcaccatatccacagcttggactcttagcctttagtaaagcacacaaacaatttttatctatagcaattgctaaagctaattctgcaccccctttaaattgttctgtaacatctataccatttctcgtttggactcgatcacctatccgctccgctgggggtcttggtgttaaaagtccacccagtacctcaggacatactggtataagattatagaggctcttaagttcttccaaacagtctattttgttatggtcaccatcataacggcaacaaacaccgcaaagacattcactaatcaacagattcggtttactcacgttatatacccactcgtaaatacagttaaaattatatacaaaaaaagactaaccgaagttagtctaatggtgccgaggaccggaatcgaaccggtacggttatttctaaccgacggattttaagtccgttgcgtctgcctgttccgccaccccggcatgggtaacgattttgtggaggcggcacccagaatcgaactggggaataaaggttttgcagacctctgccttaccgcttggctatgccgccatataaaattagtggagcgggaaacgagattcgaactcgcgacccccgccttggcaaggcggtgctctaccgctgagctattcccgcatgtacatggtgcctcaggacagaatcgaactgtcgacacacggattttcagtccgttgctctaccgactgagctaccgaggcatgaatggcgaccccgatcagatttgaactgacgatcttcgccgtgacagggcgacatgttaaccgctacaccacggggccgtatccaaagtacttgcttagtatatctgttatcagagtttttgtcaacactatatgtgtaaattcttgatgaagtttttttcatctcccaaaatagtgctctccctatgtccaggttctactaataatgcatcatctaactccattattttacataagcttttacgtaaagctttagcattgccattatagttatcactattccccacattttgtttaaaaatagtgtcacctgtaaatagatgaccttctatttcaaaacatactgaacccgcactatgacccggtgtatgatacacccgtatatgaaatggtccgatatttagtataccttcttgcaaaggaatacattgagtgaacatttttttcttgtatacacttggtcgacgacgaatcaattgcaataattcatgatctccatcatgtagatatgcaggtatattataatgtccacaaatatcatcaagagccgacacatggtcacaatgaccatgtgttaataaaaccgcaattggtttagaatctcctaccatctcaattatatgtttactatgaaatccagggtcaattatgagagattgattgtctttttttaatacataacaatttgccttatacaagcctaatgggcgttttattatttccattacacaatccctcccccataactaatgcagtatacaatataaacttctataaaattctatatcgttttgtagtatcttttttaataaaatacccttcccagaattgtggatgaagcatgactagaatcgtaaataattccaaacgacctaatagcatatctacaatagccacaccttttgcacctaatggcaataatgcaaaagaatcagttggtccataaccaccaaaggctaaacctacattactttggaatgcggtgactatttggagtgcatcacctgtagataaaccaaaacatgtcataagaaatacggatataacataaatcattaaatatagaaatataaattgttgcgtcatatgcacccatttatctggtaatggctttccattgattcgtacaacttgaaccatatctggatgtatggcttttctcaaataaatgatactactcttaattaatataatgagacgaataatcttaacgccaccggtcgtagatccactacaccctccaaaaaaactggctataaataacatcatttgagccgcagcaggccataaatcgtaatcagatacagcaaaaccactgcccgtttgtattgatactaaggtaaaggctgcatcttgaaaaacttgtcctatatccatagaattagattgaaaatataaggatataaaggtgataagaataccaataactaatacaagccaatacatacgcgtttcaaaatcagagaataacgctgagaatcctttttgaattacattataatatacggcaaaatttccacctgcaatgaccataaacagtataaatacaacacatatatatgtattttgactatataaaaaagtacctgcagtagttggtgtcaatccaccagtagcaataatagaaaatgcataattcaatgcatcaaaaggatctataccacctaaacaaagcatgataaaacagatgattgtaaatattacgtacaatgtccataatttcgatgctatagattgaatccgtggtaacactacacctggttttggcacagatgcctcagcattgaaaaaatgcgcagcatcagcaccaagattacgtaagaatgatagaatcaacacaatgattcccataccgccaatccaatgcattaatccacgccacagtatgaaagactttggtatgctatcaacatcagaaataactgtagcaccagtagcggtaatacctgacatagattcaaacagcgcgtccatcgggttgactaatacaccagatataataaagggaatagcccccaataacattgttaaaatccatgttgagctaaccactaagaagccatctctcaagctaaaggttttactcttatttccaccaagtactagtagaccaccgagcagtatggataatatagccgtaatacaaaaggaccaatatgcagtttcaaatagaatactatatataaatggtataacaagaaaagctccaaaaatatagagtaatttgcctaccaaggacatgacaatctgtatgcgcatataacccctacgttaaataattcaataatttagtaacagattcaggcaatgagaatagtacaatatgatcccccactaatagctctgtattcccccgtggaacaatcgcgtcatcaccgcggagtataacaccaactaaggctttaccaggtagacgaatatcttttagttgtttaccagctacgggagattgttctgtaataagaatctctatagattcagccttgccaccttcaaaagtagatatggacactacgccttctccacttcgaacaaatcgtagtatttgtcctgcagtcattagacgtggtgaaaatacaatatctataccaacttgttccatgagcataatatattcaggacgtcccacacgaacaacggttttaggtatgcccatatgtttccctactaaagcaactaaaagatttaatttatcatcatctgttaaaacgataataacatcgttatcggccacttcttcggcttctagtaaatcaaaatccgtaccatccccattgatgacaatagctttatccacttgtgcagccaaggcttcacaacgctcaatatccttctcaataaccttaacagtaaatcctgctttttctaataagatagctagattacgacctaataaaccagcgcctacaataacagcccgtttatggaaggttgcatgattagaaaaccattcttgttctacttcattaataccatcttttaaacctaaaaagaaaacactgtcattaggtaataatatgctttcaccatgaggtataatcatttcacctaatcgtaaaatgccaaccaataacacaccttctggaaaagttaactcttttaaaggtttatttacgagcgggaatgtactattaattttaaattccattaaacgtacagcgccttgaccaaattcttctacgtccaaagcggatggtgtttcaataatatgaagtaattcttgcgctgtaaccatttctggattaatgaataaatcaacacctaatcgctctttcatatgatcatccatatgatcaacgatattggtatcccttacacgtgctacagtagatggaacacctgctattttagctaccgcacaagataacatattaacttcatctgaatcggtaactgagataaacatccccacatcagataagtcaatttcattcaataactgaatatcgctaccattaccgcatactaaactaacatccaatgtattttcaagattatggatacgctcctgtgaacggtctataagatatacgtcatgatcatcttgtaccagtctttcacacaaggaatacccaaccttaccagcacctactacaataatcttcatagtttagacctcttgtgaatttggggtccattgtttaccagtttctgtcaacaatgtccaaccatcttcttgtactacaaggcgggatttcattaaatgacctaaagctcgtttgaatgcagccttgctgatgttaaatttatccttaatcaacatggctgatgattcatcactataaggcattttaccgcctcgttgtaataggtattccattataatctgaccatcagaaattaatgctttttctttgataggacgcatagaaacattaatacgaccatcttcgcgtttgaacgtaacacgagcctctaccatttctccaacatttaatttgcgtgtcatttctgaacgatgcaaaaaagcaatccatcgctcaggggtaataaaaaaggctccatcactagtcaaattgtaaatagcaccacttacttgttgtcctacaacagcatcggtagcagctttagaggcgcgtctcatctcatcatcaacgtccatagaaacggccatacgaccagatttatcagtgtatagttttacccataccttttcccctacttgaggtctgccacgcatttcagcgtgaggcataaaaatcccccgctcagtaccaacctcaacgaaacaaccaaaattggttacattaataacctcaacataaccaatttgaccgaccttcatagcaggcaatcgcatggaggcagtcaaacgtcccttagggtcacgatatagaaatacctctacatcatcacctatagcaaccggtgaagtttgttgatccttatggagcaaaatatcatcatttgtatttcccgtttgaccgtcaaggaaagcgccatgatcactagtgcgtagaacacgcagtgtagcaatggtattttccaataattcgctagccatagattattctccttcaaaaggaacacgtccagcatcgttccataaggcttctagtccataaaattcacgaatttcatcgttaccaaacacgtgacaaataatatcgccaaagtccaataatacccattcaccttcgcgatatccttcacgatggaggaccgtcataccttcttctgctgctatatcctcaatttcatctgcaatactttgagattgtttaatattattggcgcttacaatcataaaataatcgcctaacatagaaacaccttccaaatcaagtatttcaatatcatgacctttcttatcataagccgcttgtgcaagcgctaaaacatgttgtttaatttcttctttttgtttcattgtatctcctattattctttcttctctggttctgaacctggttctgatggttttacacgtgtgctttgttctgattctaccgcaacaggtgcttttttagtttcaggtgtagaaacaaattgacttaaatcttctggtgccaatgtccccattgtaattcccactaagcgctgagcttcagttggatttacatgccaatacacgacgtcattaattttttctttttcaccaggcaaaatataaaaatgaatatggtctttatccatttgaccgatagaacgcattaatttaatagcatcccatgtagatatattactttcataatgactccataaacgccatatatgccaagcttttgtaataaaccaagtatcttgttcccgatcaacccataatttcaagaaccgttcttgtcgttgaacacgtccaaaattatcattattttcgtctgtgtagcgtaaatatgctaatgcattatcactatctaaattttgatagcctctgcgtaaatctatatctttactaccagtttcagcatcgacatgttccatattcttttctacgtaaaactgttgactacctaaaacatcacttgtttttttgaaagctgcctcatcaacgacaacatagtaaggtatgctgatatggaatatatcctctacaacggctttcgttagttcaatattaccttctgcatacatttgatttaacatagatgcagatttttggtctctactttcaattttactattgctaggaataccaattatatccatcgtattagtattcatattaatagacatgaggaataatgagtcagcttgactcggattatttttatctcgccctacaattaatacatatacaggcttgtccaatgctttctgttctacattaaccgtatcagtatgcttaggttcactggattcttcaatctcacttgcagtatcagtttgtgttactcgatgatatacatagctgattccactatacatcccccaaccgatgccacaaataacagtaagtgctaacacgaatgcgatgattagacggccccattggagcttatttttcttcatctgacgttctcgacgtcttctacggcgacgagctcgcgctttttcacgttcatccattctaggcacctccttttttcatatgctgtataagatcattacggctaataatagtaagaggataaatagtatcagtactatctattaaatgtcgaatggtcatatcaaatccgcacaatactccggcatcaagagactgttctgcagctgcacgaatatcgtttacgccaggaaaattacgattaggctcaatataatcagctaaaaatataactttatccaattttgacatgcccacttttccagttgtatgaacacgtattgcttctaatacttgtcgattagtaataccataatgagtattcgctaataccatacctgctaaaccatgtaataaagcaccgctatgtaacatatcaacatcacaggccaaatctgcaactaaatcttgcatttccaataatggtaattctttagcacagtcatgtaacatcgctgctaaccgagcgtcttctacattagccccatattttttagctaaataaatcgctgactctacaacacctaaggtgtgtataaaacgctttttacttaatttattagataagtcggtttcaatttgttgtatatccacctttaattattccttccgataaatatcatatttttcaatatattgaactacacatttaggtaacatatatctgaccgtcaagccatgacgcagtcggtctcgtaaataagtagcagataatttcatttctggtacattcattaaatgaattctattcttagctttagaacccaataaatctaaagttgtatcaacaacctgagatccatcaggcctcatagcaccaataaaatgacaatgctctaataattcatcaataaatttccaattaggtaaatctcgtattgtatctgtaccagcaataaagtaaaaagaaacagaatctccatatatttttttgaaatgatgaatagtatcaattgtataggaaggcccttcacgacgcatttccacatcagatatttcaaaatacgggttatctgctaccgctgcagccgtcatggcataacgatgcttagcatcaataacatcattatgtttatgaggaggtattctggcaggaacaaatataaccttttctaaatgaaagctttcccttgcaacctctgcaatcattagatgtcctaagtggatagggttaaaagttccgcctataataccaatccgccgtttctctaccatatataagtcacaccctttatgactataatacaaatcaagataaataatgctaatgcttttacatacgatacccactcataacgaccttttggagtctgaatataacgataataggctcgtatcaaataatataaacgcatcacgaacgaatttgtcctgtaccaaatacaaaatatttataggatgttaatgcttgtaatcccattggtccacgagcatggagtttttgtgtactaatgccaatttcagcaccaaatccaaattcaaaaccatctgtgaaacgtgtagacgcgttatgatatacagtagaacaatcgataagattcataaaatgctgagcggttttcatattatctgttacaatcgcttcagaatgatgtgtcgtatattgattaatatgtgaaatagcctcatccacagatgatacaatagctacatttaaatcaagatcattatattctgtactaaatgagtgctcatcaacagcaatacccttaacaatctgtaatacatctggtgtaccgtgaatcgttacatgatgggtctctaatttagagtctaatgccaacagaaatttgggagcaatagatttatgaaccaatagagtctccatagaattacatacagatggacgttgtacctttgcattcacagcaatatcaacagccatgtcaatgttagcttcagcatcaacataggtatgacagacaccgcttcccgtctctataacgggtatcatactatcacgtacaacccgttgtattaatcctgcaccgccacgtggaatcactacatctatataacggcgttgttgtagcaatacacttacagcttcacgatctaatacttctactaactggatagctgctcttggtaaatcattggcttctaatacatcttgcataatggatacaatgacgcgatttgtacggtatgcttccttaccaccgcgcagaatagtggcattagcggttttaaagcataaggcgccagcatcaacagttacattaggacgcgcttcaaaaatgatacctataacaccaaatggtacggcacgcttttcaatgtgaagtccgttaggcctattaatagtttcaagtatggttcctaccggtgatggtaatagactaacttgacgaacaccttctgccatttgattaatgcgctctttagatagtagtaatctatccaacatcgtatcagggaccacgcctcgagccgaatccatatccatgtgattggcagttaaaattagttcactatgttgaactaacgcatcggccatagcacataatacctcattgatgcgtttctctggtaattgctgtaaaacaatagatgctgctcgtgcagattcacccatttctttaaatatactttcatatgaattcatactgtacctcatcaatgaataattactagattatttctgtgaacaacctcatcatatgttgtatcaatttctaatacacgagctatatcttgcgtattgtgacctctaatcttaagtaaatctgtagaactataattcactaatcctctagcgatttcttttcccttagcaataattgataccgtatcaccaggttcaaaagatccatccacttcaataataccagctggtaaaatactagctccgtgatttaatacggctttcgtacatccttcatctatagtaatgcttccacttaagcgtttcccataagctacccaatgatgcttttgagaaacaccttgatcattagcgacaaataatgtacctatattctcacctttacatactttacgtaaagaattatccgattcaccactggcaataatcatatgtatacctgaattagtcgccatatgggcagccttaatttttgtatacataccaccagtacccatacttgaacctgcaccaccagcgatctcataagtttcatctgtaattacagaaacttcgtggattaaagtagctgtagaatccgtagctggattagccgtatataaaccatcaatatcagataaaataataagcacatcggcttctacaatccctgctacagtagccgataatgtatcattatcgcctattttgtattcttcaatagctactacatcattttcattaatgattggaatgacatgtaattgtaataacgcatgtaatgtatttcgtaggttcaaatagctatgacgagaagtgctatcctccttcgtcaataatatttgagcaaccgttctaccgtactctcgaaacatgcgttcatacatatgaatgagtacaccttgtcctaccgctgctgatgcttgacgtaacacaagatctcttggtttttctttaaagcctaatggcgcaaggcctgcacccgtagcccccgaggaaacaagaataacctctttcccttggttggcaagatctgataattgacggactaaatgttctatccgttctaaatttaaatgaccatttgagtaacataatgtactgctccccacttttacaacaatgcgtttagcattcttaatggcatctctcatacaatcatctcctataagggaaaaaggttataactattatttcggtaatataatttttggttcttttttagctttataaagaacaccattgaatccaataacttgtactaactcagcaccaagcatatctgctaattcttgaaaaatcgctttatcttctggactattattaagcaatttaaccttgattaattcacgtgccatcagtgctgctcgtgcactatcaatcacgctatcctcaagaccatttttaccaatttgcacaacagctggcatagttgcagctaatgagcgtaaataccgtttctgttttcctgtcattataactcctaatctctgaatgtgaatcgttgttcaccaataacaacttcatcgccttcttgacatcctttttcacgtaatttattatccaattccatgaaacgccaaatacgttggaatcgacgtaaggattgatcatcgtcaagattggtcattgccacaagtcgttcgatacgtttacccgtaatatagaaagcagcatcatcaccacgtgtaataacaaactccgtatctggttttgcttcatacataacggtatcatcagtggcttcaacctctggctcataattttctacataataatacgctcgttccattagctcaggtaaaccttcaccactcaatgcattgattaagaaaacttcataacccttgtcttcaaaataagattttgtatttggaattgtttcatcatcaaagacaagatctattttattaagtgccacgatttgtttcttattagctaatttctctgagtatttacgcaactcatcattaatagcatcaaaatctactttagggtcacgaccttccatgccagatacatctagaacgtgaatcagaatattcgtgcgttctacatggcgcaagaaattatgaccaaggcctacaccttcactagccccttcaataagaccaggaatatcagccaatacaaaactacgatcaccagggagcgttacaacacccaatacaggagttaatgttgtaaaatgataagccgccacttctggttgtgctttagatactttgcgtagaatacttgatttaccaacgcttggatagccaagcaagccaacatcagccaatacctttagctctagttgtaaccagcgttcttcccctggttcccctttttcagcaaaggtaggtgcacgattagagctagataagaatctcgcattaccgcgtccaccgcgaccgcctttagcgatgataaaggtatcaccatcgtgaactaagtcacagaacaccttacctgattcttcgtccttaacaacggtgcctaatggaacaggaataattaaattttctgcaccgcgaccatgtttattggcactttcaccattaccaccctttggcgctttaaattgccgtttataacgaaaatctacaagagtattaatatttttatctgcttttaaaataacatctgccccttggccaccatcgccaccgcttggtccgccattaggaacatatttctctcgacggaaactagacataccgtctccgccatcacccgcttttacaaatacacgagcgcgatctataaacataattacatccttttctgcaaaactattttaatagttctattgccttttgaatttgaatatctgacatatcactagatggggtagttccctttggtaattctagaactacatctggttgaataccagttccatcaataacacgatcattaggagtatggtatttagctatagtcactttaataccttcatcctctagatttggatatacactttgaacagtgcctttaccataactattagtgccaacaatggtacctaattttctatcttgaatagcgccagcaatgatttcagatgcactagcagaacctttattaatgagaactaccataggtaatgcaggattttttccatcagatacataatttttggttttttcatctcgtgttgtgaaagatactaatgtaccttctggcataataatgctagcaatatcttgcgcactattaagtaatccaccaggattatcgcgtaagtctagaactaatgaagtcattccttcagatagaagctgctcatattgtgttttaaaatcacccgctgtatgctcagcgaattgactgatgcgaatatatccaatgtggtctgataacatcttactttttactgtaggtaatacgatttcttctcttgtaacgttaaacgttaataattgattatcccgttcaatcacaatcgttacatcgctaccagcttcaccacgtatttttgaagctgcatcttcaatcgtcatagaattagtatctacgccatcgatggatacgatgtgatcaccgcttttgatgccagctttataagccggcatatcatcaatcacggatactgcttctaacccctttgaaccatgtccaagaaccatgcccacacctgcataggtgccagaggtatgctctttcatagattcaaagtcatccttgtctaaatagacactatgaggttctcctaaggaagccactaaacctttcaacataccatcaaacaatgtggctttacttacaggtgtcataaatttctgagtcgctatgtaataggttacgacaaatcgtggtaaacccatagctgatccagaaatataccaaaatacgagccacaacataatgatggacgcaagtatatatttaattaaggctaaaccaattcttttaaaattattattcattctataaataacccataggatctactggatccccgtttacacgaacttcaaagtgaacatgaggtcctgtactattgccagtactgccggcataagaaataacttggcccttcgcaacggattgaccttcatctacagcgagctcagagttatgaccatatagtgtagaaagtccattaccatgatcgataacaacagcataaccatagccgcccatccatccagaccaaactacgacgccaccatcagcagcatgaacaggtgtaccttcatcaacgccaatatcaataccggagtgataaattgtagttccccaaattggatgaacacgatagccataaggggaagtgatttcaccactaacaggccagccaagttgtcctgtaccttgtacccaattatctgatgcaccttgccctccagaggattgagccgctgccgccgccgctgccgcagctgcggcacgtgcagcttgtcgttctttcaacatagcacttacttgcgctgaggaagcattaagttcttcaattgcttgcattgcagttgctctatcattttgcgctttttgaagaaccacattgcgttctgcttttttctgttcaatttcagcctgtttagcaagtgcagatttttctaattcaaccaacttagcacgatctgcttcgagtttttgtttatgagcttcaatgtcagcacgctcttttttaatttcgttaatcaaggtgatatcagaatcgataattcgttttaaaacctctaatcgattagcgaaatcactaaaatctttagacccaataactacatcaagataactaagtcgtccattgatataaatatcacgaactcgtttataaaatacggattctcgaccttctaatcgtttttgagcttccgccaattgacgttcattaagtgtaatatcattttctacagctacacgctgctctttaatcgtacctaactcagcagtcgcttgacgaagttgttcttcaatttgtcgcaactgttcagaaacgcttccaatcacagtttccgcatctgcttttgcagcattttgctggttaacttgttgttgaatcgaatctaattgatttgttaaatcttcatcttcagccataatataggctggtgtcccgcataataccactcccgaaagaagggctgctacgagacgagttttaaatgtatactgtctcataatccctctactatactttcatatattgtttcaatgaaatggtactgccaataatgcctacgataatcccaccgccaattaagcatgctactaattgatagaagaatgggaacataggaactaatgggaagaatgcaagtgaatcggatacttctatggtaataaaatgatagaactcacccacgcataatacggcaataatggacccaataaagcctaacaacatgccttcgataacaaatggccaacgaataaagccattagtagcacctacatatttcataatcgcaatctctttgcgacgagcaaatacagttaaacgaatagtgttagaaataataaacaatgtagctgctgctaagaaaccgatgagtacgataccaccaatacggataatttgtgtaattcggaacaattcctcaatgatgtcttgaccataatgtgtactttctacgccttggaatgtagttactaatttagctgtagatttaacatcttcaggattttcaaaggtaagaacataagagtttggcaatggatttacaccacctaaggcgttcaccaattgttgttgatcccccaagcgctccttaaattctttcatagcttgttctttattaacaaattctaagtgttttagatttggaattgctttcacttgcttaccaacagccataatttgctctgtagtaagaccatctttcaaatacacacttaactgcacttgattctctaagctcgatgccatgttattaagattgataacaccacagagaaatacaccaagcataaataaagataatgctacagtggaaatagacgctaatgtcataagtccattgcgtttcatggactttaaggcttccttaaagaaatatttcattgttctaggcttcattaaattctgcacccctcatattatcactaagaacacgaccatcttttaattcgataactcgcttatttaaataggtaacaatatccatattatgggtaaccataattacagtagtgccaaaattattgatatgcttgaacaaatctacaatgtctttactcgtattcggatcaagattgccagttggttcatctgcaattaatacagatggacgattgacgatagcccgtgcaatcgctacacgttgctgttcaccaccagataaatcttctggtaaatcattcgccttatcagataagccaactaattcaagaacgtgagctaccttctctttaattaccttaggtttctcctcgataacctctaaagcaaaagcgatattttcagctacgcttttgttaggtaataatcggaaatcttgaaatactacgcctaatttacgtcgcaattttggtattttactacgtttcaattttgtaacatcaaattcatcaactataacaaatccagaatctggtgtaacttcatgagttaataatttaaacaacgtagatttaccagccccactatgaccacaaatcaatacaaactcaccatcattaatggtgatgcacacattatcaagtgcagtagatccgttttcatatactttactaacattcttaaattctatcattggttccccttttatttacgtgtcaccacttttttaactgcttttacaatatcttcagctgttaacccatatttcgccatcaattcttttggtgtaccactctccccaaatgtatcttgaacaccaacgaattccataggaacaggtttatgtgcaacaacaacttcagatacagcagaacctaaaccgcctaaaatattatgttcttcagcagtcacaatagcacctgtttcttcagcggctttaatgatggcattagcatcgataggtttaatggatgccatattaataacgcgagcagaaatttgttcaccttctagttgtttagctgcttcaactgcagggcctactaaagcaccacaagcgataattgtcacatcagaaccatcttttaattgattggatttaccaggtgtgaaagtatagccttctgctgttacatcatcaacaccagcacgaccgagacgtacataaactggaccattataatcagcagcccaatgaatgacagattctgtttctttttcatctgctggcacaataacagtcatgtttggtaaaacacgcatacatgcgatatcttctaaactttgatgagttgcaccatcttcacctacagtaatacctgcatgtgtagcacatactttcacattaagttttggatagcatacagcattacggatttgttcaaatgcacgaccagttgcaaacatagcaaaggaagatacaaatggaatcttacctgctgcagctaaaccgacacctacagagattagattttgttcagcaatacctacattaaagaaacgttctggacactccttcttaaatgtatcagtcttagtagattttgataaatcagcatcaagaacaataatattagaattttctttaccaatttttgctagcgcattaccgtacgcttcacgtgttgctttacccattattgtacccccatgatttcatttacgaatgccacaccttgttcttcactaggtgccttaccatgccaaccagcttgaccttccatttctgcaacacctttaccttttacagtatgcatcacgatacatgtagggccatctgtgaaagctttcgcctcttcaatggcatgatgtaattcgtcaatatcgtgaccatttacttcaataacattccatttgaaagctttaaatttatctggaattggcaatggggacataactttttcaatatcaccatcaatttgtaggccattataatctacaaaggcagtcaaattatttaatttatagtggcctgcaaacatagcagcttcccatacttgaccttcttcaagttctccatcaccgagaatggaatatacacgataatcagcattatcgattttacctgctaatgccataccacaagctgcagaaatcccttggcccaaagaacctgtagacatatctacaccaggtgtatgcttcatgtcaggatgaccttgaaggaaatgattaattttacgcaaattgattaattcggatttaggaaaatatcccttttcagcaagtgtcgcatacaatgctggcgctgcatgaccttttgataacacaaaacggtcacgatcttgctttttaggattacttgggtctacattcatttctacaaaatataacagagacattacatcagcaatggataaagagccacctggatgtccagatttagctgctgtaacagactgtacgatgcttacgcgaatcgcttttgctttctcttgtactaattgtttttgatcttgactcaatgtagccataaagacctcactttctggataatctccaatttatatttaatactcttctaaaagtgaaatagcaaattccgcattgcgttttgataccttacgcaatgtttgaatgcgattgaatgaatgttgataggattctgtagattgtaaaagttctacacatcgatcatatagaacattagaatctaattctgtcatagtaccaattggttcttgttcaatcatatgtaaaaaacttgtaattttagggtcataggaaataccaataactggttttcccattaaggaactaaatacaagtgcatgtaggcgtatgccaatcattagatctacattgccagataaggatagttgctcttctgtggtaaaaggtccttctaatacgattggtttgatcttcattaatgaagctataatctttgcttccttcgtatcatcaggatgagacataggtatgaatactatttcagcatcttgctctaagcttaaccggctcaatacatctgctaaactttgtctatacgccgtatcatccttccaactacgcacagcaatgccgatgcgtttcctaccactttcaataggagcacaattatatttggttaaaatattagcaccgatactaggattggccttatgcatagctaatacagcatccgccgtaacctcaacatcgtaaattcctagagcattcaactcatctttcgaaatggaatcacgaactgtaattccatctacatatttcaacataaatttaacagctcgttttgtagatttacgatataaaggaccaataccttgagagtacagcataacaggttttccgagtaattttgcaagtcccatgatacttagataataataggtatttcgaatacttgtagcatcctgtaataaactacctccaccgctaatcactaaatcagcattacgtatggcattcaaaataccaaaggcagcaaatgttccaacagccttaatattatgttttctactagtctcttgaggattgccggagataaccgtaatatgtgcatcgtcttctacatcacgaatagcgtcgataatggcgcaaagcatagcttcatcaccagcattaccaaagccatagtaaccggaaataacgatattactcatgactgtcctcccgatgcatagcccattgcgagatgtaaataaggaaacgaactgcaagaataagaacaatacctatagcacaaccgagcaacaaaccatcatacccacgcataatagacatgaagacaggtgttctaatatgacagaaagtttcaaccatagacgctacgccgataacgccagctatagttaatacaaagtgaataaccataggccatttacgtaggaatgcaaatgttgcgagcatcaacaatggatgaccaatcataaattccttttctcttggtctagcatatagtgtattctctaggaatctacgcaatacgagttcaaatgttggaacaggcacacctgccgtatgaccactacggcctacaaatacccaagccgcagcacctatagcagcaaacacaaagaacacatacatttttacatctgtagttagaaattctttaatgaattgcttagcttctgttccagagttgatcatgcgacctttccataatggaaagcgttgtagatatgcaatcataacaaggataattggtaatacgaaggtaagttttacacctctaaagatttcaaattccataaagaattttgtattacctaataatgccgcaatatacatgccaccaatagcagcaaataatgttgctattacgagatagagtaatgcgagtagcgtagatttccatgcacctataggacgtgtaccatctgatctgcgccattcttccataagaatcaccaaggctccaacaggtgccataatagctgcagataaagcccaaatttgaactaataatgtaccgctagttacaataaatccaacaatggatagtaatgatagtgcaaaaaatagaactaattgcttgtgttgtgacatagctataaacatttgtcccacatacacaaataaggcaatactaccaatcattgttagaacaactaataaaggattaggtgtatagtcaggataaatatctgctggcccaaattcatagcccttagcactcaatttatctgttgcactatgtacatagttaatcgttgtttgtaacacagtttcattattttgccctacttcatacatagggaataaattaaaacgaatgttgcgctcaatatcgctaatatagaatcgttgagccgcttcttccggagtaatcttctttaactcatctttagaaattgtgtaaacacgacctacactgtaattcttcttagccgccatatctaagaatcctaactgaggctcatattgcaactgattaacagcttcaataccaaccaatggaatatgaagattattcatagcttctaaggtttcatcaatatgatctggtgcacctaatgcctctttaccagcaaatataatacctgttacatgaggtaccccatctagacgattaaatacatatttaatatcatcagatgtaacattgcgataattagtaggtcgaacaattacattgaatccgcgattggccacttccatggcttgaatcttagagatgcctaagttcatcttcgcatagctatctgaagtagcaccttgtaattctaaaacgggtcctatactagtattaagttctttaaccttttctttactaatacgatgatataggtcttcgcgaatttctttataatagccttctttaccaggaataagtgcaacataagtagcgcctggtttaatagaaccaccattgatacgaacatcggacatatcttgtgatgaaagtaatttaatttcaccagcgtcatttgccttttctaatgttctatcataaatggcaaatgccgttattcccgcctctttcagtgcatcaaaagcatctttttgactacgtttttcaaaggcattagctcgaagtacagcatcataatctactatattctcaatatgattttgtgccttttcaattgtattgcgctccattactaaatagagtgctgaaataagtcctactatgatacatagtataagaactaatgagtgcttagttttcttaacagtatgcacgatatttcctttctaattgagtacaggtttaatcttaatatgaatttctccatgttcaacgttaacagactcagctttaaccggaactgggaaattattaaaatcatagatagcaataggatgcaattgttgtgatgtaatacctgcaatagtcaatccactaactgtaaatcgactaggagcaaatgataaaacattatctttcaactgcaaggcgccttccaaactagctgttcctttcaaagaccccataatgttaacagtcccagttaatgctatacggtcattattaattactacattagcatcctgtagaccttctgtattctgaattaggaatttctttaaatcatcctctaacacaataccttctacataggatggaccaagacttaggacctcaacctcatgagatgcaatgagagaaataggattaataacaatattatttgcctcataatgaagactagaaaaattcaactttcctaattgaacattttccaatgttcctgccgcgtgatctgcttgtccgtaaaccagtttaaaggctggtgtagattcaataactacagtttggctggaaggtttaagtgattgatttaactcatcttctacaatagattccatatattttggaactacaaattgagcacccaccacacatacaatgataagcaagacgatgaatattaaaaattttttcattatagcacctatactgttaaattagcttctttctttaaatagccttctatgaattggtcgatattgccatccataacagcctgtacattaccagtttcaaccgatgtacgatgatcctttaccatattataaggatggaatacataggatctaatttggcttccccattcaatagcttggtatgtcccaccaatttgttcttttaattcagcctgcttttcaagttctaattcaaataattttgcacgtaataaacgaagagcttgttctctattttgcatttgggaacgctgagattgacattgaactacaatgcctgttggtttatgcgtcatacgaacagcagaatccgttttattaatatgctgcccaccggcaccacttgcacgatatgtatcaacttggacatctttcatatcgatattgatttccacagtatcatcaatttctggcattacgtcaacagccgcaaatgaagtatgacgacgtgctgcagcatcaaatggcgatatacgaacgagacggtgaacacctttttcagattttaaatagccaaaggcattttcgcctttaataagaaatgttgcacttttgattcccgcttcatcgccaggttgttcatccataagttccacggaaaaccctgtcttttctgcccaacgcaaatacattcgaatcagcatagaacaccaatcttgtgcttctgtaccacctgcaccagcatggaatgtaagaatagcattattctgatcatattctccgccgagtaaaagcaatacctcttgtttttcaacagcctcttgaatgccatttaaaaattgtttgatttccccctccatagaggtatcttcttcttctattgccatatccaacatgacactagcatcttcgatatcagacactaactgcttatacccctctacagagttttttaattgtgttgcctcttgagaaatctcacgagccttatcaggattatcccaaaatgtaggatcactcatctgtacatcaagtgtgaagattcgttcttctttctgagctatgttaaagtgaatccctcattccataaattcgctcttctaaaccagagataattggttttaaatcctctaacaatttatgttcaccacctttatagaattactacatgtacatagtaacgatttactgtattgttaaaatgaaaaatggccgttgcccagaaggtgttttcccattgagcaacgtgccattcacaaatgttaatctatgttttgtggctccaacacatcttcatgatggggttgtgcaccttctaagtgatcaactggttgttcaatttcttgaatcaattgtgcacgaattttgtacaatgccatgattgtttcatcttgaatagattcaatcatatgctggaacatatcataggcctcaaatttatattcaaccaaaggatttttttggccatatgcacgaaggccaataccttcacgaagcatatccatattatccaaatgttccatccatttactatcgacaacacgtagcataatcgctttttcaagttggctaaacattgcttcacctaaaagatcaacacgatcttgatattcgctatgtgcgatttcgtgtaaacgttcatccaattcttgacgtgtatattcttccatctcttctgcagacataagttcagaagtcaagaagtattgactcaagtgtttatgtaaaccttcgtaatcccattcttcaggatacaatttttcatcagcatatgtatcaacagcttcagttacaagcttgtcaatcatttcattaatggtatctcttaaagattcatttcgtaatatacgacggcgttgctcatataacacttcacgttgttgattcataacatcgtcatattccaagatatatttacgaatattgtagttatgatcttcaactttcttttgagcacgttcgatagattttgtgattaaggaatgttcaattggttcatcttcttccattcctagtttatccatgataccagaaatattatcagcaccaaagatacgcatcaagtcgtcttccaaagataggaagaattgtgaagagcctggatcaccttgacggccggcacgaccgcgtaattggttatcaatacgacggctttcatgacgttcagtacctaagatagctaaaccaccaagttcaggcacaccttcacctaatgtaatatcagtaccacgaccggccatgtttgtggcgattgtaaccatacccatttgaccagcattggcaacaatttccgcttcttgttcatgatgtttagcgttcaataccttatgtggtacaccagcgcgcaataacatatctgaaagttcttcagattgagtgatagatgtggtaccaatcaaaataggttgacccgtttggtgacgttctacagcatttcgtacaacagcacgatattttgctgctttagatttaaagataaggtcaggtaaatccacacgaatcaaaggacgatttggaggaataggaattacttccaagccataaatatcattaaattccttttcttccgttttagcagtaccagtcataccagacaatttttcatacatacggaaatagttttggaacgtaatagatgctaatgtttggctttcacgttcgaccttaagaccttcttttgcttcaatagcttggtgcaaaccatcagaataacgacggccaaacatcaaacgacctgtaaactcatcgacaataacaacttcaccatcttttactacatagtctgtatcgcgatgcatcatagcataagcgcgtaaagaggcacctagtaaatggttgagttcaatattatcagcatcatataaattttcgatacctaacattttttcaacttttgtaataccagaatctgtcggtgcaatcgtcttttgtttttcatcgattgtatagtcttcatcttttacaagatgtggtacaacttgcgccaatttataatagttgtcagtagagcgactaccaggaccagaaatgatgagcggagttctcgcttcatcgatcaaaatggagtcaacttcatcgacgatggcatagtttaatggacgttgtaccatttgagatacatcggacaccatgttatcacgaagataatcgaaaccaaattcattgttagtaccatatgttacatctgcagcatatgcttctttacgttgattataatcgagatttgcaacaattaaaccagtagaaaggcctagaaaattatacaaacgacccatttgctcactatcacgtgtagccaagtaatcgttgacagtaacaacatgaacacctttaccggataaagcattaagatatacagctaaggtagcaactaaggtcttaccttcaccagtacgcatttctgcaatattacctctatgcaagcaaataccacctagcatttgcacatcaaaatgacgcataccaagtacacgtttagatgcttcacgacatacggcaaaagcttctggtaaaatatcgtctaacgtttctcccttttgtaagcgacgtttaaactcatcagttttagcaacgagattagcatcacttaattttacataattaggttctagttcattaatatgatctacaattttgcgcatttttttaacttcttttgcgctattatttcctataagactttgtaaaaagccgaacaaacaaatcactcctcttcgggatatcttacattattatatctaattcattataacgaaaaagccttgaatagtcaaagaattcaaggcttttctatagatatacaactagaaatataaaatggataccatttctggtatccattctatatttcactcgattaaatcaacgtagaaagataattgattaaataatcgatcatattattttaattctggttcaatcaaaccatagaaaccatcatgtctgcggtatactacattcattgtttctgtttccgcattgaagaacatgaagaaatcatgtccaatcaagttcatttgcaagatagcttcttctacatccataggacgaacagcaaaatgtttacgttttactacttcaattttttcttcttctacaggtgtatcaagaggtgctacatctggatggaaagcttcttgacgtttaaaacgttttgccaaacgagttttatgtttatgaatttggcgaacgattttatctactactaaatcgattgctgcatacatatcatcatttgtttctacgccacgaagtacaattttatcaacgaaacatgtaatttcaattgttgctttatcacgcactacagatagtactgcttgtgcatctaactcatcatcaaagtaacgggtcaacttactcaatcttttttctacatactcacgaagagccgctgttacttcaatgtttttacctctgattgctactttcatatgtcaacaccctttctaaaaatcaacgaccagttgttagaatgttcttattactctatttctggtgtcttaattagtatttctacatctacatataaaactcctcttttttgataaaaatttttatattttttgtagaaatatgtattgtacactattaaatgtgcaaaaaatcccaacaaataagatgttgggatttttttaatttagtttttatgtaatatttggtatatgtttacgcttttacaacatttgctgcttgtggaccacgattaccatcaacaatgtcaaatgttacattttgaccttcagataaggatttaaaaccttcgtcttgaatagcagagaaatgaacgaatacatcgctaccatcttctctttcaataaatccataacctttttctgcactaaaccattttactttacctaacatggataatatcctcctataaaatatatattgtcttactgtcgtgctctatatctgtataataacatagcgtgtataaaatatcaaattagaacgctcgtatttcatttaaattattatgcagattcaactctaagaaataaataaatttaattcttaattccttttaattattggttttattctatatattctatagtataaagactcatatttatttcattataactaaaatatatgagtattataaatatttttttgtactgtacaaatgcataaactgtatatttatcacaaatatttatatctaatatctatttatatgaattaacagatttagaaaaatcacttaattacagtatttcctaaagtaaatatatataatttatcaaaatttgttataagataacgggtaacaaaaaacactcataattataaactacgtaattatgagtgctgtttcgaagaatctataaaattttagacaagaacaattttgttctatcactagaaggtgcatcaaatacttgtgctggtgtgccatcttctaggatttgaccaccatcgacaaataacactctatccgcaacctctttagcgaagcccatttcatgtgtaacgataaccatcgtcataccttcatcagccaaagatttcattacatccaatacttcgcgtaccatttctggatcaagtgccgatgtaggttcatcaaataacattaccttcggtttcatagctaatgcacgtgcaatagcaacacgttgcttttgaccaccggatagtgagtccggatacatttgagctttatcagctaatccaacacgttccaatagtttcatagcaatgtcttgtgcttctttcttatccgtttttcttacatttacgggagccaatatcaaattatccaatacggtcatatgtgggaatagattaaagttttggaataccatgcccacttctgtgcgtacagcattcaatttattcttatcggataaatccatgccatccacaattacatgaccactggtaggttcctctagataattcatcgtccgcaaaactgtacttttaccagatcctgaaggaccgatgattacgacaacttcacctttatcaatttgtagattgatgccctttaatacttcatttttaccaaacgattttcgcacatcttttaattctatcattttacgttatatttcctttcaaggtaagcaaccaatcgagaaatcggtattgtcatacatagatagataatggcaaccgttccccaaatttcagtagccgcataggttttagcgataattaattgaccacgacgcatcaattcttcaaaaccaataacagaaactaaagaagaatcttttagcatggcaataaattcattacccaaaggagggattgatgctttaaacgcttgcggaataataataaagcgcatagtttgccaccaagacaaacctagtgaacgaccggcttccatttgccctttatttacagattgaatacccgcacggaatatttcggatacataagcaccagagttgatactacatgctgcacaggctgctatataaggatcgattcgagtgccaatgatttgaggtaatgcaaaatagatcataaagatttgtaccaacataggggtaccacgaatcacatctacatagcatttagcaatcaatcgaacaattacgaaattcgacattctagctaaggaaacaattaaaccgataatgaaaccaaagcttacagcaacagctgtaatttttatggtcattaaagccccatataataataatggtaaattactcgttatgacattccagtccatttacaactccctaattatttaaaatccaacacaacaggcatatctgcaggtgcatctacattaaaccattttttatataatgtattaaattcaccatctgctttcatatcagcaatagccttattaatttcttcttgtaaagctttattatctttattcaaagccaaacctaagtattcttttgtatttggatatggcaagatttggatatgttcatcaggatgttttgtgctgtaatattgagcaactggtaaatcaataacagtagcatcaacaccaccattttgcaactctaacaaggcttcattactatgatcgaattcttttacagaagtgccttcgatcttatgagctaaatcggaaccagttgtccccatttgagcagcaatttttttattcttcaaatcgtctaaggaatgaatgctattagaatctttatatacaatagctaatgcattttcatagtatggagatgagaataataccttttcactacgcgcttttgtgattgtcataccagaagctgccacatcaatatcatgtgtatttaatgctggaatcaacgcatcaaaggcaacgtttttaagttctacatctttgttaatacgtttgccaattgcacgaatcaaatcgatatcgaaacctgcatagtcttgagtcttatcatccttaaattcaaatggtacaaatgtagcatttgtgccaacaattaactttttattagacgttgttgtagaagaagatccacaaccaccaactaaagatgcaaccataacaaccagcaaactaccgagaactaatttttttacttttttattaaacatcttcttaccctcatatataactaagtttatttatatagtatatatacatggaataattatgtcaataataatgtatataacatttttaaaattccacattttaaagatttctctattaatttttatacacaatacgtattaatatacactctctgtatacaaaatatagcttaacaaacgcaatacctacaattttcatttatacatctgtataaatgaaaaaagcacatgagaaaagcctcatgtgcccgttatacggctgacctggtctttgcccccacactcgcctgctggaaggttcgctcataagcccatagctccccactactactcctctcggtttcccggcaggacttacatctaagccgcaccatgctcacagccctttggactgcttatgtggatcgttttgcctgcgactggcctcgacttacaaccacagacccgtattttaatattatagattataaattatatctatgtctatatctttattatttgcagttaatacaaacatatgtatttatcaatatcactgttgtgagaataaaaaatgcaagccttaatttcaatgtatagaaaataggaataggaatataaaataattcttcatttttctattataattcttaaaacacgatttttacatcccattcttaatgcattccttttttgtcaacactttctattatgctaaatatgaatacctattcaaaaaccaaacattataccgatacacaaagcataaaaattgttgtataatacgaatactgttaaagaagaacggactataagttgtacgatgtaaaatccttggggttgggactttacatatttgtatagtagaggggtttattatgtttatgttatcattgatgcagccgtccgggctgtatgaactggagaaagatagtttagaggccattagtgctcaactattacaaatgatacaaatgaaaagctatcacttgtatacacactctgtacaagtctccaattatgcagttagtattgctgcaaaaatgggattgccattaaatgaaattgaacaaatccgtcatgctgcactattacatgatgtaggtcttttgatgattcctaatgcgatgattcaaaaagcaccatacttgaacaaacaagaaatgtcaaagtataaacaacatgctgctagtggtgctaatatgattgaaaactatccatgttgtcaacaaatcttatcatatattcgttaccatcatgaaaaatgggacggttccggatatccaaaacatttacgtggcgccaacattccacttggggcacgtatcattgctgttgcggattactatgattccactgtgaatccatccactgaattttgggcaaaaacaaaagctaaagcaaaagaagaattgtttagcgcatctggttccctctttgatccagatgttgtaaaagcatttatcgatgtactaggttaaacaacttaattaaggctgtaatagaacaaaaatctattacagccttttatttttaaaaactaccactagctaatgtcaatgcttcaatatattgaggatgatattctcttagtattcgtgcagctgactctaaggtagctcctgtcgtaaatatatcatcaactaataaaatccgcttatcatataacaacgaggaatcgcaagtttccttccacataaatgccttatcgattgtgctatgacgttcactaccagataagctccacatttctttatgggtatccattttatataaacaatcaaaccagttataacagacctctttttcagtattatattccataactccatttacactgtcatcgctgattctaccatcaatacgattagaatttgaaaatgagaacacccaatcataaaaaaatagatctacctgattatatcctctaactttctttttttctgcacttgatggtataggaatcacataatgaggcctataatcgtgcatcctcaagttgtacgatgctaaaaaaggagcagcccctttggactgctcctttttttcgttaaatttaacgtcatatatcatggatttaataccacctcgatagtcagctagaatccaagcagaatctagcgaggacagtaatttagatggcacttgtcttacatgtagaacttcttcaatacaagcatcacaccaatccccttgttgttgtacatgggtaccacaatgaggacaaacaggaggaaataaaaaatcaaatagattcattatccatcacatcttccttgtaaacgttctttaaataatgtatatcgttcttcaccattaaccgttttaacagcacgctctacagaactctttgtaccgatcatgatgacctttcgcttggctcttgtcacggcagtatagagtaagttccgttgtaacataccaccgtacataggaacaaatggtataataacaacaccatattcactgccttgacttttatgaactgttatagcataagcgggcataatcatatgcgcttcatcaatagataggcgaacctctttatgaataaagcgaatgcagatatcagatttagtaatggcataaataacgccaatttcaccattaaaaacttctaattcataattgttaagaacttgaattaccttatcaccaacgcggaatgtaattccattaacacgcacctctcctttataactatctggagggtttacggattgctgcacatattgagatatacttgtactgccagccttacctctacgcataggcgaaataatttgaatatcaagttcatcatcgacaaattctttttcccgtttatacacatcaacgatggctttcatcatatcaccaagagagttaacggaaatgaaagtgaattcatcactagtcgtatcaagatttggcatttcaccacggttaatagcatacgcactatcgacgatactattaccagaactttgacgataaatatgttgtaatcgcgtatacggaaccatatcactatcaagtaaatctttcaatacgaatccagcacctataggaggtagctgatccacatcgcctacgataataacatgggcctcacgaggaattgccgacataagagaataaaacaatcgcacattgagcatggatgcttcatcgatgataataacatctatatcaagaggatcatcttcatttttagtaaaatcataggaatcactgccagctacaggcatgagcaagcgatgtatagttgtggcttcaaactcagtggcctctgttaaacgctttgctgcacgtcccgttggggcacaaagaataatacgtcctaatccacctaattgaaaacctttaactaaggctttaataatcgtagttttaccagtgccaggtccaccggtaataagcgaaaatttttcaaaaaatgataattctatagcttccttctgttcagggccaaaggtaatatgattatctgcttcaaatcgctcaataaaatctggaatatctagagatataggatcagcttcaattaagaaatcacgcgtatagtgtacaccttctacttcagatacatacatttcaggtggatatacatagagtatatcatcataataggtactatacataatagcttgagaaattaatgagtcaatatggttagctattaaatctgcatctacttgcaataaatcgtaagtacgccctattaattcatcgacaggtaaacacgtatgaccttggttatctaaattccctaaaatccagtttacaccagcctctaatcgtcgctcgtcatcagcatcaagccctaaattcatagctaatgtatcagccgtattgaataacatatctggggcgatacgcaataaattataaggattatcacgtataacatctatagaggatgcaccataatatgtgtacacagtgcgagaccatttagaagaaatttgatgagactcaaagaagtggtttaaatcggataatataccttcaccgagtaatgtattatataattcctctttaacgcctttgcgtaaacctggcacatctttaatttcatctggccgctcttcacgcagtacatctaataaccggaggccgaaataatcacagattttctctacagatttttcgcctaatccctttatgcctaagttcatcaaatacattctagcagcacccatattatcgggttttaatttttctatactagatgcatcaaactgaatgccatatttttgatgttctacataacggcctttaatctcaatatcttccccttcttttggggcttcaaagcgaccagtacaagtaatgtattcctcattataatctttcacaagaaatacacaatacgtgttctgtgtgttctgatatataattcggtatacaaatcctcgtaatacttccattatttctccgtattaggtaatgcttcgataatttcttgaacagcatcagtaatgctaccttcattgccaatcttaatatgagctacactttcatataaaggataacgttcctcgtaaacattgaaaatatattcaatactttctttcacaagtggacgaatttctaaatccaagtcatcgagaatatggttgacgtcgcgattaacaaagacaactaaaccattatttctcatgagatttacaattttttcagatgtcactgtgccaccacccgtagcaataacagatggtttattatgaatcaattctttaattgtttcgtattcatacttactaaatgcatcttttccatcatagataaagatattttgtacggttttccccactttatcttgaatcgtttgatccaaatcatagaaatctcgtcctaattctttagctaacattttgccaaccgtagttttaccggcaccaggcataccaattaggaaaatatgcttatgcatgtgttcttttaagaactcattgctaatcgaaataacatccttcatataggattcaatatatgtcaacatacgagaatcgtcacattcagttttaagactagaaatgatctcatgatcccgttcttcatcaattagtggtaaatgatgttcatccttatatttaccaattgatttaatgatagataaacgttgttcaaataagtttactaactgtgcatcaatagtatctatttgtttgcgtgcgtctttaatatccatagctcccccttatgggttattacgtaaaatccgaattgctgtttcctcatcgaccttcatttggtcaatcaattcttgcaaattattaaatttaacctcaccgcgtatatatgatataaattgaacagttacttccttaccatatacgtcttggtcaaaatcaaatacatgtacttcacatcgatgatattgatttttgaaagttggattatcccctatatttccaacaccatcataccaaatgccatctatacaaacccgattagcatataccccatcaggtgggattgccatctcattgggcaataaaaagttaattgttgggaatcctaatgtacgtcctcgttgatcgccttgtataacgatacctctaaattgatagggccgtccaagccatgcagaagcttcttccatgtggccttcttctatagccttacgaatatttgtactacagattggtccttcatccgtggaaagtagcggttctactatgatatgaatgcccttagcagacaaacgttctcgcattaactgagggttacctgcccctttagcaccaaatgtaaaattagtacctatcgcaatgcctactacgtctacacctcgacaaagagcatctaaaaattcatctggagacattttgaatatgtctaaatccataggcaagcgtaaaatataatctaccttaagagattctaatatctcatccataatatcggcagataatacccgtttaggaacagctccaggtcgcaatatagtcataggatgcgcactaaatgtaacgagaaccgtaacggcatcatgcgccttagcctctgctattgcattaccaatgacccgttgatgaccacggtgtacaccatcaaatgtgcctaatgcgtatacgattttacgattaatttgacgtaattcatcaaacgagtgtaaatgtttcatacttatccttcaataaaaatatttttatccactttaagtgaatgtttcgttcgttttagaatgcctacaaacccatgaggtccataagctctatacttttcagatggaatcgtatgagaaaaggcctctacgattggtaattccttaccttgtaccatcatctttaattgtacactatctacgtccacttttgaaagatgagataccgcaatatccgtaggcaacaacaatttttcaccgtgaatcgttaattcctccgctatataggcagattgaatatcaaaaggccccacacaagttcttgccaaggaagtcatagtcccgggaatgcctaattgaatacatatatcacgtaacaacgaacgaatataggtaccaccagaacaggtgacacgaattgtaaaaaaaggaaaaccataagctaccaattcaatattaaaaatcgtaatggttcgcattggtaactctacaggtatccccttacgtgcatattcataagcccgtataccattaatttttatagccgagtacttggatgggcgttgctcttgtgtgccaacaaatctagatagcactgatgataattcatcccacgttggcggtatcaatcgttcattaattgcagagtgatccgccagtaatgtaatgccactagtgagattcatatcatcgtcaggtaataccggctgtcccgtactatcttcagtgtcagtaaaggtaccaaatttacattctgctacataggtcttattaaatccatctgtgtattcaatgagacgtgtggccttacccaaaaagataggcaatacaccataggccatagggtccaatgtgccactatgaccaattcgtttttcttttaaaatgcgacgacatatacctacagcatcatgactggtaataccaggaggttttaaaaatggcagcactccatccattatttgataacctccaatagacgagacttagcctcatcgatagaaccttctatggtacaaccagcagcacgtatatgaccaccaccaccaaaatgattagcaatagcattcacatctgtccccttagatcgaaggctgatacgcgtgcgatttgggctttcacccttcaataaaatggccacatcaacagtatctacattacgaataatgtcgacgaatccatctgtatcgtcgcctaatatagacataaccgctggagatagctcgatagtagcaacgcgattatccttataaaaagcaatagtttgcattacctgtttcgttaattcaagacgtgctgcacttacggcctcaatcgtttcggaaataacattagggcgagccccagcagcgacacaacgactagccattttaagtgtattagctgtagtattactaaatttaaagaatccacagtcggtggcaatcgccatataaagagcattgcccatagactctgtaataggccaattccattgttcgcacaagtctgtaataatttcaccagtagccgcaaaatcaggttttaaatatagatgatctgcaaattctgaattagaaatatgatgatctatattaaaaataggtgcactaaagagtgcacctacgcggccaatccgttcatacgtgctagcatctaataccattagcatatcaacctgtacaggatgtgtttcaaaataggcaacatccttaatttgatcgatatacgataaaaaggaatatttttcaggtattacatcatccacgaccatatacacagttttgccttgcgctacgagagcctcataaaaggcaaccatagaaccaatagcatcgccatctggtcgtacgtggacagtgagcattatagaattagcttcacacagagccatgtgtaattgattaattgtgatcttactcatgttctgtatcctttgtgttaatttgtttcttcatcctttttgatttcattcaaaagggattcaatatgcatgctgtaatccaaagatgtatccttatcaaaggtaatcgttggaatatggcgcaattttaataccttgccaagctcggtacgcacatgtccagatgcatgttttaaagcgataagagtatcttctttctctttatcagaaccaaacaaggaaacataaatcgtagcttcacgcaaatcacctgtcacgtggacatcggtaactgtagtaaagccgatgcgagggtctttcaacccacgcatcaacatttgacttacttcttgtttgatgaattcttgtaattttcttacacgaacatcactcatagtaacctcctaaatttgaggtgcaacttcttccatcaagtacgcttcgattacatcgccttccttgatgtcgcggtaaccttccaaggagataccgcattcgaaggatgttttaacttctttcacttcgtctttgaaacgacgtaaggaatcaaccttaccttcaaatacgacaataccatcacggatcaaacgtacttcggaatcgttcgtaatacgaccttccgttacataggaaccagcaacgatggccttaggtgtggagataacttgacgcacctctgcacgaccaacgacaacctctttaaattgaggtgccaacataccgcgcatagcagactcaacgtcattaatagcatcatagatgacacgatatgtacgtaaatctaccttttcttgttccgcagcacggcgaacatttgcatctggacgtacattaaagcccattacgattgcattagatgcagatgccaacatgatatcagattcgttaatagcacctacggcagcatgaacgataacgatacgaacttcagggtttttaataccttccaaggattgacgcaatgcttctacggaaccttgaacgtccgctttgatgataatattaaggtcttttaactcaccttgttgaatttggttgaagatatcatccaatgtaaccttgtgagtagcttgtaattcttgtacacgttgtttagcaatacgtttttcagcgattgtacgtgcttcattatcatccataccataaatgatttcaccagcttgtggaacttcggagaagcccaagatttcgactggcatagatggacgagcaaccttaaccttttctccacgttcatttgtcatggcacggactttaccatatgcagtaccagcaagaactgtatcgcctacgcgaagagaacctttttgaacgagcactgtacatacagcaccacggcccttatcaagttgagcttcgataactacgccatatgctttacggttagggttcgcttttaattccataacctctgctacgagcaagatattttcgagcaaatcatcgataccttgtttttgtttagcagatacaggaaccatgataacatcgccgccccactcttctggcaataaaccatgttcagatagttgttgtttgacatgatctgggttagcacctggtttatccattttattgatggctacgatgataggcacatctgcagatttagcatggttaatagcttcgatagtttgaggcattacaccgtcatcggcagctactacgagaactgcgatatctgtagattttgcaccgcgtagacgcattgctgtaaaagcttcatggcctggtgtatcaaggaatgtaatcttattgtcattgtaacgaacttggtacgcaccgatatgttgtgtaataccgcccgcttcgccagctgttacattggtttgacgaattacgtccaacaaggatgttttaccatggtcaacgtgacccatgatagttacaacaggaggacgaggtttcaatgtttctggtgcatcttcaatttctatgatatctgtaggatcttcttctggttctacttctgttacggttacaccaaaatcttctgctacgatagtagctgtatcaacatctacctcttggttaatgctagccataacacctaaaagcatcaattttttgatgatttcagatacttcacggcccattttttcagccaattcttttactgttaaaggaccgcttaattcgatttccgtagcgattgcttcttgtgctttacgttcttcttccgctttatgttgcaagtattgctcgttacgatgttttaccttatttttcttcttttgcatggaagtggacaataaggattgtgggcgattgttaccttttttatttttcttattgcggcgatcattgccattttgttggttaccgccattattgttgcgattatctacacggccattgcggttgcggttatctgcattaccattgtgacggttgtcatttttttgaccttgttgaccatcattcttttggccttgttgattaccatttggacgatcttgtttttgatggttacgaccatcttgtttttggccattattttgttttttagtaggctcattaatttgtacatgacgaacattagatttcttatcgtcatgtttcttatcatcatgtttagcctcttttttatggctctgttcttttgctggtttatctatttttacagctttattaggtgttgcagctttttcatgtttgcttggattagcaggagcagctgctgcctttgtatcggccacattagatttaccacctaattggtttttcaccacagtataacctgcatcatctactgtattaacggcttttgtaacattaaaattatgttgttgcaaaatagaaataacctgtttactttcaacgccaaattccttagcgatttcatgtacgcgctttttggacatctacatacccccttcttactgatcaatctcttttagtaatgcttttgcaaatccatcatcctctacggctaccactacacgtacttctttgcctatagccgtacctaatgtttctttactgccgactttacgcaatgggatatgatgtaattctgctaattgtatgtatttcttttcattattggccgcacaatcacctgctaatagaacaagcttaggggttttctttttcatcgctttctctacgatgaaatctccggaactcaattttccggcccgttgtgccaagcctaagagatttaaaactttatcttcattcatatgctgaaattattcatgaccttccaaatcgtgcttcaatgcttcatatacctcttttgatacagcatgcttcaaagagcgttctagttttttacccttatacgcagcctcaaaacagtccatggatgcacagatataagcaccacgaccaggggctttaccagttctgtcgatactgattgtcccttcttggcttagagcaacacgcattaactcgcgcttactctttggttcaccacagcctacacaggtgcgcataggttgagatttggttttcattagtcttcgctttccgctgcttcagtacttgtaaaacctgtaaaaggattttctgcagcttgtgtttcactcttaatgtcgattttccagtttgtcaatttagctgctaagcgagcattttgaccagctttaccgatagccaaggataattggtaatcaggtactacaacataagaagatttttcttcttcactaacatctacagagattacctttgcaggacttaaagagttcgcaatataaatggcaggatcttcatcccattttacaatgtcgattttttcatcgtgcaattcatctacaatgtgttgaacgcgttgacctttcggacctacgcaagcaccaactggatcgatggattcatcgcggctatatacggcgattttagaacgcataccaggttcacgagctacagatttaagttctactacgccttcatagatttctggcacttctaattcaaacaagcgttttaataggcctggatgagtacgggaaatcataatttgagggcctttcgtagttttcttaacctctacgatatagcatttaatgcggtccccttcatgatatgtttctgtaccgatttgctcagttggaggtaagatagcttctgttttacctaaattgatatatacgtttttaccttcaacgcgtgttataacacccgtaatgatatcaccttcacggctataatattcttcgtatacaacactgcgttcagcttctttcaaacgttgaatcaacatttgtttagctgtatgagctgcactgcgaccaaagttagcaggtgttacatctgcttcaacaatatcaccaatttcatagcgtttatcgattttacgagcatctaataggctgatttcagtttctgggaattctacagtttctacaacttgtttcttcgccattaccttataagcaccagtttcacgattcaattccacatacgcatctggattagaatgtggttccttacgatatgcttgtaataatgcagcttctagggattcaaaaataacctcaggtgcaaaacctttttgttttgtcagcaccataactgcttgaattaattcttgactcactcgtatgcctccatatattaaaaatcaagatgtaatcgaatttgtgcaatggcagaacgttcaaatgttacgctttcaccattgattgaaaattctatcgttgtatctgtaaagccttgtagtacacccgtatattgtttactgccattaataggtttgaacaattggatatctacatcacggccattatagcgaatgaaatctttatccttttttagaactcgatcaagaccaggagaagacacttcaagcaaataattttctgcaatagggtctttctcatcgagagctgcgctcaatttttcactgaccatttgacagtcatccaaatcgacaccacctggtttatcaaggtacacgcgcaaataccaatcccgttctcgaacatagtcgacatcgactaattccagattcgtgccagctataacgccttcaactacagaggatacaaattcctctacggcctctcttttcatagccatcgcctccttataacatactacatatcgattatatacgctgttttcatcatacaatttgatacaattatatgactaatttcacccaatcataaacgaaagagtgagcaaaaaatagcccactcttaaaaaagtttatataaaagtcatatatagtatagcataattccgctaaaatgtacaatttaaccgcgtgaatttagttcacacagtatattttttaaatgttcagatagtacatgttccaaatcatctaatgacttagcatcaagatgatgatcaatttctggataattttgataccgtaattctgcaaagaattcatcgcgatattcattatagtacaacagtaatcctgtacattcatccatctttcgatattcacctatgatataggaaccattaatcatgcgcaccgcatttttaggtgttatatctcgtacaaatccttctaactcagcgggcataacagcttcataatcccaatttagtagccccttgcgcatataggtataggtaaaattttctgcactgttaattagtaattttgaaagcccctgaacacaacgttcttgtaggccctgccaatacggttcgaactcttggcgcacaaaagatatatctacaaatgtgaacaaaggcatcactacatgcacggtataatcctctacctctttatcgtagagagcacaccacttccaccctaaatcattttcatagtgaaataaaggtaaagtcaacacggcttcacctgcagctaatgtttcttgcgctttcacaatttcatcgggccctgtcaccttgagtttaaaattaccaatctccggtggcaaccaagaatagtctaaagacttacaggtttcaatgatgttctccatataatgactcatacctttcttgatagattaaaacggttttaacatacatacgcgtttcaggaaatggaatcgtatcaaccataccattccaatttttttccttaatccatgattctacatgtccacgacctgcattataagcagctaacgcttgcacctcatcaccgttaaattcttttaataaataccctaaataccacgtacctagctgaatatttgtttctggctcttttagctgacgatctgtgtagttaccatgtcccatttgttgtgctacccaacgggccgtatccggcatgagctgcatcagtccaagcgcccccgtctcagattccgccgtattcttgtatttactttcagctaaaataacactagccaccaacgatggtgacacctcttctttttccgcagccgatacaactacatctctataatcaaaggggtatgccgtatagcgtgctacaggatcttgcatatggttaaaataaaaccagcccaacacgacaacagccaatgctgttgctgtatttcgtttcatacatcctccccttaatcctaaccgtatatattttgaatcgattcaatcatatatattgataattatttattatacaacggtagtagtttctcatgccacaatttttccaactgaatatataattcaccaggtgtaccatcattattaatgatgacatctgcaaaggagcgtttatcatctaataacatttgactttgaatacgcgctaatgcgtcctttttcgagtatccattgcgctccattaaccggcgaacctgcacctctggcgatacatagacaagccaaaccgtatcgagtcgctcataccacttaccctcaataagaagaggaatatcataaattacggctggagcttcttcctcttcgtacatagcactcaattcatcaatacgctgacgaatgaaaccatgtaaacagctatttaactgtaggcgtttttcttcattatgaaagacgatactaccaagtgcttcacgatttaatctaccatcatcgagaatcactgtatcaccaaataattcacggatagcagcgagtccaggcgtaccaagatcaaccacttcacgtgctactacatcggcatcaatataaggtacattcttctttttaaaaaagtctagtactgtactcttgccagatgcaattccacctgttaaacctatttttaacatatgtgcctcctgcatctatccttctactcgaacgttatatgtaaaatttattttacaagtgcccagttttccgcattatgtacatcaacgataagtggaacatgtaattctacaatggattccatagtttccttaagcaacgtttgaatagcatccaattcatcgttaaccacttctagtaaaagttcatcatgcacctgtaataataagcgagatttaaacgccttctcctctagaatagattcaaccttgttcatagcgagcttaataatatcagcagcagtaccttgtatcggtgtattcattgctgtacgttctgcgaaggaacgacgattaaaattacggctattaatatctggcaactcgcgcatacgaccaaacatcgtacgcaccttacccgtttcatgggcttcttttaccatgttatccatatattctttaacctttggatagcggctaaaataaagctcaatatagttttttgcttcttgacgtgtaatgcctaaatcacgagacaaaccaaaatctgaaatgccatagataatgccaaaattgatagcctttgcgtgagaccgttcttcactggttacctcgtcctgagacttgccaagcacttcggcagcggtaaatctatgaatatctttaccatcgttgaaagccttaattaacgcttcatcaccagacaaatgcgccaagatgcgaagctcgatttgtgaataatcagcactcaccaatgtatcaaagccttctccaggatagaataacgctctaatttcacgacccttttctgtacgaacaggaatattttgtaagttcggatctgaagagctcaagcgtccagtagctgttaccatttggttaaatgtggtatgaatgcgatgcgtttcaggattgatgaggaccgctaagccttcacaataggtagaaactaatttagctacggaacgataagccaaaatcttctctacaatagggctttcatgacgaagcatatccaatacttctgcatctgtagagtaacctgttttcgtctttttaatgactggtagattcatcttttcaaacaagatgatccccaattgttttggagaattaatattaaacgtttcccctgccaattcataaatttcttgctgaacagcttcgagttccgccttgaatttaacagttgtttcttctaattttacagggtcaatataaataccatttttctccataactaataatgtatgaatcaatggtaattcaatattgttgtataaatcccataaggattcgtcttgcaatgccttaacagcagcatcgtccatagcaagcaatgctttcaccatagagacgcattctacatctacactacctgtagcaatagatggcacactaaaacgctctgttaaatagagatatccataattggtacgcgttgggtccaacaaataggccatcaaggatacatcgtgaatacgggccacgccattttcatacaaacgaatttgagccggttcatcgtggcaaagaacctccatcaattccttgctttgcgtcgttacaaccgtctttgcaccattcaatgcattcaataatttgtcattatgagaaccatctagcttgataatgctttcaccattattaatgaaagcagacgtaatcgtacggaacggcgctttgccgtctgtgatgatatgaacgccaattgtttttcctgtataaaattcttcagtaagagcagatgcatctaacagatcttcaatttttatctcttcggccatactaaagagtccaccaaaatcctctgtatcgccaccttctgcgcccatcacactagccaagcgaggtgtcaatttagtaaagcctagggtttcaaacatcggttttacttcgccaagatggaaattctgtacaaattgatcgagcgtataagacaagtccatgtcagtcttgatggtagccaattgacgagataagaaggctaactctttattttcaacaagacgttcctttaattttttgccagaaatgttctcgatattctcatatacagactctaaatcaccgtattcattaattaatttaagagctgttttttcaccaacccctggaacgcctggaatattatcggaagaatcgcccataagagccttcatttcgataactttatctgggccatagccatataattcagtcatattatccaaggtaacctcaagcatgtccgagatacctttttttgttaagaatacatgactgtagtcagtaacaagctgtaaattatcgcggtcaccagtaataatttgcactgctaaatcagaagatccaaatttcttagacaaggaaccaagaatatcgtccccctcataaccttcctcttcaataacacaaatgccaagagccttcaacacatcttgaatcaaactaaactgaggacgtaaatcctctggtgcatcagggcgattacctttatattcactatacatttccgtacggaacgtttgtcgacctttatcaaatgctacagcaatatagtcaggtttaatttcctcatagagtttaatgagcatcgttaaaaaaccatataccgcattggtaggcgtgccaagggcagacttcaacggaggaagcgcgaaaaaggcacggaataataggctgctgccatctataatcattaattttttcataagtacacctcgcttaatcatatgtttcattatagcatattggggcgtaataaaattgatttttactacctttgcttctatcaaaaatatatgcattcatctttctaagttttgcagaataggactgagggcagccccaaaacctccaccggccgggtctgtctacggcctgcggccttcgcagggccaaagtcggttttggagctaccctcagtccattcccataaggtattcaaaatgttatgcatatattttatgattacagcatttagcactaaaaatcaattttattactgctgggtacaaggaaaaaggacgccattctggcgtcctttgggtataaaaaaagcccatcaatgatgggctttggctctataaaattataaagcgtttactttagctgcaaggttggattttttgcgagctgcagtgtttttatgaagtacacctttggaggctgctttatcaattacgctagtagcttgaacaagtgcttgttttgcttcttctactgcgcctgcttgaacagcttcaacggttttacgagctgctgtacggatttgagattttacagcggcgtttttcgcacgacgttcagcatccgtttttacgcttctaatactggatttaatgtttggcaattgagtcacctccttaaaaatcgtttcttatacctgaatgattatatcatacaagatattgtgacgcaaggattatattacacaatacgactatttcataatgtcttttaaaaatgatgtgcctactgcatatggtgaaagtccaaaattcgccaatacggtttgtcctatatcacaaaaactatggcgtaaacctaaatcgatagcctctttcatacttgggctataggcaagtaatggaacatgttcccgcgtatggtctgtgccatgccatgtaggatcattaccatggtcagctgtgatgataagcaaatcatcttctttcaataatagcaataatccactcaattgataatcgaaatcttcgatggcacgtttatagccttctacgttacggcgatgaccatatagactatcaaactctacaaggtttaccatcatgaggccactttcaaaggaggaacctaataagtaaggcaccacattcatgccgtgagcattcgatttggttggatagctttcatcccatccgacatgagcataaatatcaccaattttgccgacggccaccgtaggaatttgagcagcttgtaattcctgttgcaccatgcggtgttcaggcatacggctatagtcatgacgattcgaggtacgtataaaatgaccgggttttcctacaaacggacgagctatgatacgacctacataataatcaccaacgcatactttgttacgcgtaatttcgcacatacgatacaaatcctctaaaggaatcacatcctcgtgtgctgcaatttggaacacagaatcggcagaggtatacacaataggttttcccgttttcatgtgttctacgccgagacgctcgataatttcagtaccggatgcaacctcattaccaagatacccatagccggtttctttggtaaaagtatccatcaattccttagggaatccatcgtaaaatgtagggaacggaaccgtaacaggatggcccatcatttcccaatgaccactggttgtatcctttcccgtactgacttcctccattttcccataagcacccataacaggtgtttcatcggtcttaatatccgcaatatttgccaatcccaaagaacgcaatgtaggacaatgaatcaaacctgcagttgcttcgatatgtcctaatgtattagatccttcatcattaaattttgccgcatctggggcatgaccaatgccaacagaatccataactaatataatgattcttttatacataataactcctattgtaatattcagctagaatattacatgctatactaccattaagagccaaataacgtgagttaaggaataaaaatgcctaacgtatgaggtatcctaccacctcaacacgttaggcatcatcatatttccgtattttagatgagcctaacgctaacagcacgttatttggctctctttatgtgttcattatactatatattatttttttaataaagtcctatttaagatatggcatagcaagcataagtgcagccagtgatttactatccttaatttgttctgccttaatagcctctaataattcaggtaatgtatagtattcaagttctacgtattcatctggatcccaatgagtttcacccatggtgaggtcttttgctaagtatagatgtaatacttcattacaaaacccaggacttgtcgcaattgtgcctaatgaaatccattctttagcacggtaaccagtttcctcagctaattcacgtttagcacaattaataggttcttcgttagggtctagtttacctgctggaatttcaagcaaaggctgttgcagagcataacggaattgacgttccatcacaattttattgtcttctgtaacaactacgattgctgtagcacctggatgatggacaacttcacgccacgcttcattaccatttacatcagctatatcataggtaaccttaattagtttaccatcaaacttcatttcgctagatttctgtatttctttgctaattgccatacttaattcctcgtgtatataaaatgattgttatattataaaacctacaactcattatagcacaaattaattacaccaaaagaaggttcctactcgtcatattgagactaataagaacctatttgaatgagattatataaatgttaagctacctttacatagccttgtaatactgtatctacaatactacatttagagtctaactctgctttgagtgccgtttcaggattgagttctctagaaaccaccatatctacgatagatttagagaaaccagatacaagaacaacaccactaggatgcatttgtacaggaattgtattatgtgcatagacagatacattccagaaaatgagctgtggcatggtatacccaaggagttcaaatttctgacgacatgattcaataacggtcgtattatcctcatgctttgtagcctgatcaaactgcatatcagaaataatgaggcacgctgaaggtaattcctcttgacgcaaatgattttttacagctgtatctagaattaagtcaaatgttgcctctatatccgtattgctgtaatcgtcaaagcgatgcaatcgtctaagcttatctcgcaaagtttcacacatcgaaatgtctaccatctgagggcaattgctaaaggtaatgaatcgatttttaaaggattcattcttgttatgctgtgcacaatacaatgcaatcgaatctgccacgctaagtgcggtaacggaactattacctgatagttgttgccccatagatccagacccgtcgcgtataactaagatatcgtcataatccttaggtgcctcctgcgcattccataattgctctaatgtttcatcatacggtcttaaaatattcctccagcaactattattgtctatataggcttgcacgatatcatacaagaacatagagttcgcattaatcttaactgagtcgtctcccttttctaatgatgtaagatacgcctggcggcgttcttcatcatgttttaaaaaggcattacgatatttaagattcgcctttgatggcacatgattataattaatatcgttccattggttgagagaagccttgcgatctaccaccgctagatgttcgcgcaatctagacagagttttgcggtactctcgtgcacttagatgtaacaaggattgtaaaataactgcttcagaacgtttttgcttagacgatgtattattggatggcatccatttagctaataaactaatggaatcgcctagtccacacgccattacatcgcgtctaaactgattagctattaacgcccctagtccatcgtgtaagataccacttgtagtatcaaaaaagatgcgtaacacatcatcccaacggccatagttccataactcggtgccgatgatgaactgcaatgccatctctggatacaagtcaccaattttagtgagcatcatgcgaaatacatcacgctcgccaagacctagcttaatatggcgagcatacataagccatttcatggtatacagagggtcttcatcataggatgtaatgaataagcgcaatgcatccacagcatccatagtgcgatgtacaccataaaaatagcggtcatgtttacttttaccataaaaatcaaccgcaacttgacgtaatgcaggcacagagaaattaaggtccacaagaggactgccacttgtacgatacgcagtaccatcattagcagtataagattttttattgtttgttaaagcgttcataaatgtattcatagttcatatctccttggcatataaaaaaccgctgcggattatcacaacgtaaattttgaaagcaaaataaacaagacaaccgtgagcggttacaatacaaagttcaagacaattactaacctcactgaggctaaggataactagacacgatactctagaccaaagggtctccaaaatcactttttctggttaaatcatcgaagattgctgctagtgtctaaccttatgaatcgtttatgaacaataactatgaaattatactagattctatactcatctcaataaaacgatatatgtgataggattgctgttagaatctaagtctttctgttctacatgttggtgatttctttcaccttatgatgtaattataacacacgtatccgtgtgtgtcaataattatttttaaaatatttcgcttttttgaaagttagaactagcaacacatgttttattgcattgctagtcccttataattactactaatacttggcctctacacgccagatttcatcgactatccgtttcaatggtccgcgtgatgggcgtagaaatctttcggccatagaatgcattatttatgattatttatatacgtaataatatcatctaaagaaatattttgattcttgcctcgtaataatcgccatacctttctaactaatttatagaatagatataaaccagccaatggccagaatacaccaaatgggttttgttcaaatggattccgtggatgtggaaatggtccaggcataggtcctataatattaggccatctatgttcatgatacaccccttcaggatgaacaccagttttatttctattagaagaaatatactctactacatcctcgtataatttaggatcttctttttttacactttcaagagcttctttgataacatctgttttcataccatacacctctatactacaaacaataataaaacaactgattacatgtatattgtacaaaagtgtatgcgtataaaataacgtatttaatatattcatagaaaaagctctctatcaatttattcatgaattaacattcattcctaatttaatagagagctttcgtttccatagtttataaatattaagaatatattctacgttcttaatatttataagtaacatatttattatttttcaactactgaaataatttctacaccatgtaaactattagcatatcttgatttaacttgatttctagcatcactactattagatgcattaacagttgtcccattaacaccatttctcgaagaagatttaggatctgatttaattctaaatttcacttgatatctctttgacataataacctcctaagaaattatagaattcaaatattcatacccagaaaaaatttgttctaacgatgtacgaatacgtacaacatgactatcctttaatgatgctattttttgaatttcctttaaatatttttcctcatctttatctataactccatcaaccatcattaatgcagtaatttcgatgtaaatttttctaagagtctctatagctttaatagattttaaatcctctaaaacttgactttgagtttttaacggcttatagctattaatttttattcccatttcggaaccatattgatccatcataactttttcattaggatctaactcaccattagcgtaacaagcattaagcgccaattctaaaaatagttctttttcaacacaatctaatgaatttaaatacataatattttctccttttaaatagtttatttaacatttacttccttggctttaaatctagctaaaaggtgcggtggaacctctgactcactaatttgttttactgtttttcttcctttttcaccttgttcttcttctctaattttattaaaacacttatcacaataaatattagattcataatgatgacaattaatatctatagctccacattgaatacatgtatatttagaaatattacatttattaataatatattcactagtattatctaataactcccaggatgctaaaatgtcagtataatttttaagattaattaaaaattgataacaatcactattatctaatccaaattttatcgcaatttctgaaagtgttataaaatctctattctttggtgaaccaaattcattgctcataaatgaattaaaattctgttttaccacttcaatatctacgaaaaattttcctaatacaacaatattatgattagatagaatttctttaataccactatcggaagacttataaatattaaaatataggtttaatgttaattcacttaaatcaaactcattagcaagattagtatatttattaaaatcatttaaatcatttatcatcactccatattttcttatctttgtttctattactcgctcacaatatttttcaaaattattacgtaatatttctttgtaatctagagatatataataatctattttgttcatattcaaaacaatgatattatcatatttattaactacattcacaatattagtcaaattttcatcatataatttattaatgagagtaaatagatctaagtctgtattaatagattgcaaaggtatttcaccagcaacacttactactgttttctcctttaatgtatcagcacttatataaacttttgttttcaaaacttctgaaattaagtcatcaactttttggaaaataccatcttgtaacttagtataaaaatttttatcaatataaatatctaaaggcttttctaaataaacaatatcattagacttcttattttctaaagcattatttaaagcctctatatatacactatttaccaattttaaatataaccaatatatgttttcatcatacttatcgataaattgagatttaatacttcgaatcgaaatatatctatgagtacacaattgcttatttatatatttttcaatagacttttgaagtgatattttacttctagcttttataattacaatataaagtagtacacctattaaacccaaaaaatttaaatgagaaatcataagaatacttggtagaagtattagtattgataataataagtttttccaaattatatatataatattataaatggtataaccaattaaggcacctgttcccaaaataaaacttaatattaaaccaataagtccaattattatgactgcagcaataataaaaagtataattgtcaacattttattttaatcgactcctttaactctttacaatattctttattaatcttgtaaaaagtatttaaagacattttttttgaataatatttttcataagatttattaacattacaaaaatcagggcgcttatcataaatcatacacaaattagtttcctgatttaaatacttacattcaccatttttatttgttaaaaatttgaatcctggtacacgcccaacatttctacaacataaaccgcattgatcacagtcaaattccattactttcataactctggtgcttttacttcaaaactaatatatggattgccttttaattcttttaatgattctggcttcaaaaagcgtatatctcttaacatattatcagttgaaactttaacccattcatcacgttcatttttaaaatataattccatagaaatagaaaacattttatcggaaaatgatgaaaattttaactcaccagctacaaatttaagccctttttttaaatgcatcaatataacttcatctgtcttttttgaacacatcatagcaatttcatctaaggttcttgtttttactaaaaacccaaatttcttaatcaatacatctgcaaaggcttcagtcaatttgattttactttctatttgctctactacattattctcaataatagggttctctttcttttccatactaattctccatttctaacattagttcttctgttatatcggcttctttttgagctatttttgcacgaatatgaggaggcacttcactttcatctattgttctagttgtagtttcctcaatccattgtccatcctccttataataaagtttattcataattctagctaaagcttttgcaccctcacaaatcaaatctccgacaaacataaattcataaggtacaaatgcacgaacagattcccatgcagacacgagtttgggaataaaatccttaacccaattcactatcgaatcccaatttgcaacaattactgctcctccaattaataatccggcagctattaatactggtaacatatactcctccacatataaatatttaataagaaaacactaatcagctgaataatcacatgaattattagctgacttatctaactgtgaacgtacatagtcttcgctaactttacgtttagttaccgtaacatcatgacctttattatcacttttactttgtataactaattttatttcatcttctaaatccactgtatttattacacttttttcctgtctagccactttaaatgcacttttcaaagtgatatttgaaatatcacttcctgaaagatcattatatttactcgaaatataatcaatatcaatattagttggagcttcttgcggcaaatataaattccaaagcttttttcgagcgttataatcaggaagggaaaatttaatatgagtcccaatccgacgcataaatgcactatctatattttcaataaaattagtagcaaatataatataatcttgataatcatttaataacattaatagaacagaacgtgtttgattaacacttacatcagtagcacttttcatattatcaacacgtttgcttaaaatagcatcagcttcatcaaagaaaataatagcattatactttatagcagcctcaaatacctttttaatatttttaggtgtttcaccaacaaattttgattctagatcagcataatttacaattaaaatctttctacccaaacaattagcaatggcatgcgcagtcattgttttcccggttccaggtgggccatataaattaatccccattcttttagagaatttatgtgttttatcaaagccccattctttaaacactaactctctataatttataaattcagtgaaatcataaatttgcgactctgtctcttttgatagaatgatattttcaaaagaatatttaggattttctgcaacatatagttcacttatttcgctagacttatcttggtctatctgaatagcactcattttagaattatcagtttcaaaattatctcctccatttatattttgtgttacaatccgtttccctatcgccatatttcactccccatttacattaaatatttatcattactttcttgttatattagcatagatttattacgctatatttaatttttcattaattcttcataaatttattcatctttacttcatgaagagttttctatatttacagataaaatattttatcttaagtcgattttaattcatattcatgcctctttaatcctttgacagcccattcagcatgtaatcgatcatagcgatcaccaaaatcctcatcttctcttggaacatcaaattctgctttttcaatttctgctttaatgtcttctactgtgatgatgttttcttttaaagttttcatagctaatctcctcataacacaacaaacaaaataaatatggttctggattacctttagtatatctaaccctatacgtaattttttacaccttgaattgtcaagtcaaatgcaactctactgaatgataaacctcgtatggagttttccaatttaagcatttgcgcggtctaagatttatttctttcatttttgcttcaacatagctatctgattgattaatatccacagttttcgggaaatattctctaagcaatccattggtgttttcgtttgttcctctttgccaaggatgatgtggtaatggaaaataaaattctactaaattcaactcctgactaatttctgcatgtttagaaaactctttccctctatctggagttattgtttctagaggttgattttttaaaagcttaatcatcgcttgtttgactaaaaatgcattcttttttgcaattttttacatagcagatacctactttttcgatcagttaatgttactaagcaagccttaccagtctgccccataactgtatcagcctcccaatcacctaatcgttctcgattatttgcaggatctggtctatctgtaattaaattactaatttgaattattccacgtctttcttcataattttttgtatgacgacttttaccacgatgtcgtagtttgcgaacaactcctctatttccatgtgatagttctttttcatcaaaacgaccattatatatttccctgtaaattgtattgtagctaatagtgaagcttgaattttcaaatttcaatcgagaggagatctgttccggagaccattgatgtctcaaaaataaattctttacacattcatatagacttggattatctagcttttttcttggtttacaattaaagcgtctatttttatatctgtcatgggcttcacaaggtatgtactcgccattttgactatttcttttgatttctcttgatatagacgatttattttcccaagtaaaattgaaatttctgtttgattttttcctatatcaataaaatgttttagaatttcgcgctcttttagtgtaaaatgagtataatgattcatggctcctcctgatttttagatgtctttgcaaacactattttatcagaaagccatgaatctttttttagttgcacttagattataaattcaaggcacaaaaagccgcccaacataagttgagcggctttcaccattctattcagaattgtatgtaatttacatagtcccagtgctaccgataccacctgtacgtacgcctgttgcatcgtcatcgttggtgataaggtatttagagaaaatgccttgcgcaacgcgttcgcctttttcaagggtaacaggttcgttgccaaagtttaggagggcaatcataatatgaccttcgttgtcctcattgttgtagtaatcactatcgatgataccagtactattcacaagtgctagtttgcgtttgatagccatgctagaacggatatgaatggcaaggtattcgtcgtatgccatgaaagctttaatacctgttggcactaatactacttgacctggttctaaagtaacagcttcagcgcattcaatatcatagcctgcgctttctgtggttttacgtgttggtaaattgatattttgttcttcaaaagcagaaactacttcaaagccacgaatatccatgtaacacctcttatttcaaacaatctttacgggacaagttaatacggccttgtttatcgatttcgataaccttaaccataatttcgtcgcctacatttacaacgtcttctacattttcaacgcgttcttttgcaagtttagaaatatgtacaagaccttctttacctggtagtacttctacgaaagcaccaaatgccatcaagcgagttactttaccaaggtatacttcacctacttcaacctctttagtaaggttttcgatgatttgttgcgcctttgcagcaccttcttggtctacagaagcaataaatacagtaccatcatcttcgatgtcaatttttgcacctgtttcgtcaatgatgctacggattactttaccgccagaaccaattacgtcacggattttgtctggatcaattttcattgtaatgatgcgtggcgcgtattgggacatttgttgacgaggttcagcaatggtatctagcataatgcccatgatgtgcatgcgacctttatgagcttgttccaatgcttcatgaaggatttcacgagacaaaccagaaattttaatatccatttggatggcagttacacccttagctgtaccagccactttgaagtccatatcgccaagagcatcttccataccttgaatatctgttaagattgtgtagtgttcaccttgtgttacaagacccattgcaataccagctacaggagctttaataggcacaccagcatccatcaaagacaatgtggaaccacatacggaagccatggagctagaaccattggattctaatacttcagatactagacgcaatgcatatgggaattcttcttcgctaggaatgacaggtaccaatgcgcgttcagctaaagcaccatgaccgatttcacggcgtccaggaccacgggaggaacgagtttcccctactgagaaggatgggaaattatagtgatgaatatagcgtttttctgtttctaaaccaatgccatcaattgtttgtttttcagacaatggcgctacagtagctatgttcaatacttgagtttgaccacgtgtgaataggccagaaccatgtgtacgaggcaatacacctgtacgacaagagattggacgaacttcatcaagttgacggccatctggacggattttttcaacagtgatcatatgacgaacaatttccttcgtcatcgcatcgaatgctttatttacatcagctaaattatctgggtagatgtctgcgaaatgtgctaatacatcttcacgtacttcagtttcttgtgcatcgcgttgttgtttatctgcacaacgaacggctgcgtcaagtttatcgtgaccatatgcacgaactgcatcagcgatttcagcaggtacgtctttgctttcaaatacgcgtttttccttgcctactttagcttttacatcttcttggaatgcaacgattttcttaatttcttcgtgagcagccataataacttcaagaatggtttcttctggaacctcttgagcgccaccttcaaccatgaggatagcatctttagtaccagctactacgatattaagatcagtttcttctaattgtgcttttgttgggttaacgacaaattcaccatttacacgacccatgcgaacgccagcgattgggccagcccatgggatatcggaaatagataatgctgcagatgcaccaatcataccacagatagcaggatcacaatcttgatctacggacataactgtagctactacgtgtacttcgttacgtacacctttatcgaatagtggacgaataggacggtcaatcaaacggctattcaagatagcagattcaggtggacgtgcttcacgtttgataaaaccacctggcaaacgaccaatagcatacattttttcatcataatctactgtgagtgggaagaaatcgatatccttcgcctctttagaacctgtagcggtaacgagtacgcgtgtatcgccataaccaatcattacggcaccgccagcttgttttgcaagttccccagtctcgatcgtaagcgtacgaccagctaggtccatttggaattgttccattcctattcctcctaaaaatcttcttatacgtataccttattattatatatcatctaattaaattaggctattttttctatccatatgatatactttaattgttgctaactcctattctggcaacagaaaggaggtgtttctgtggtagattattttgtttcccttataatcactatcataggtggtgtaacttgccattacatcatcaagtggctagatagtagatttaaatagcaactagcacaataaaaaggacagagttgccgctctgtccttttttcgtgtttccacaatagattatcggcatttgtttccctttgcctaaattcattataacacaaggaaataaaataaaaaagccgtccaaatggacggctaattgtattatttacgaagaccaagacgttcgataagggaacggtaacgttcgatatctttacgacgaaggtagtcaagcatgttacggcgttgaccaactaatttcaacaaaccacgacgggaatgatgatcttttttgtgttctttcaagtgttcagttaagtatgtgatgcggcttgttaaaatcgcaacttgtacttctggagaaccagtgtcaccttcatgagtagcgtattctttaattactgctaatttagcttctgtagttaacattaatgttacctcctaaaaaaataataatcccgataagcttaagtaaccgttggagattcgaatacttcgcttacgatatgtcttatgacttagttaagtatacagtataatcctcatagtgtaaaggttttcatgaaaaaagagaggataatatcccctcttttttaaaccatattatgtaggtacttattttgaaccgagcatcatacggtcgcttaacgcaccttcaccagctacttcaaatttttgtaacaaatcagcaactgttaattttttcttttcttccccttttacatcatagatgatacgaccagcgtccatcatgataagacgattaccaaagcgcaatgcatcacgcatgttgtgcgtaatcataagggttgttagattatgttctgaaacaagtttatctgttaattgcaatacattttcagctgtcttaggatcaagtgctgctgtatgttcgtccaagagtaataaatcaggacgaagcatagtagccataagcaatgtaatagattgacgttgaccaccagataataggcccatccgtgcagatagacgatcttcaaggcctagacctaatagtgcaaggcgttctttaaagaatgcttgttcactatctttgaaagcccatttaagacccaagtttttgccacggcgcatcgcaaggatcaagttctcttcgatttgcatattgcctgctgtacccaccatagggtcttggaatacgcggccgatgtatttagcacgtttgtattctggcatttttgttacatcaatattattgatggtaatactgccttcatcgacaggaaatacaccagcgatggagtttagcaatgtacttttaccagcaccattaccaccgattacggtacagaaatcgccttcttctaagcgaaggtcgatgccttgtagtgcagttttttcattaattgtgcccttaaagaaggtctttaccatattttttacttctaacatagtgtcctccttaacgagctaaccatttggctttcaatgtaggcaaagaaagcgcgatggcaacgagaatagcagtgaataattttaaatcgtttggtggcatacccatgtagagtacggcagcgattacgatacgatatacgatagaaccgagtactacggcaacgaggctacgtacgaaggatttcgtaccgaacacaacctcaccgatgataacggatgccaagccaattacaatggtaccaatacccatacctacgtcggcaaaaccctggaattgaccgataagcgcaccggacataccaacaaaaccattggaaatcaatagaccaagaacgatcatattatctgtgttcacgccttgggcgcgaatcatttgagggttaacacctgttgcgcgtagagctgtaccaatttcagtgccgaagaaccaaaatagtaataaacataccacaacagctacaataacaccaacaatagcagcagaccacatatttggtgtgtgaagtacgctaccaataattgtataaattgtatccatacgaagtaaggatacgttcgctttccccatgatatgaagattaatggagtacaaagcaatcattgttaagataccagctaatagtgcaggaatctttaattttgtatgaatccaacctgttacggcaccagcagccatgccacctacgccagcaatcaagatagaaagaattgggttcataccagttgtaatcaaaatggcggaaatggccgcccccattgggaatgtcccttcaacagtcaagtcggccacatcaagaacgcggaatgtaatgaatacaccgaccgccaacaaggaccacaaaaggcctgtcgttatggtgcctaccactaaatctaacatcaaaatctcctcttttatttcatatctttacgaagtgcatctggaattgtgatacccaatttcttagctcgttcttcgttgacagtcaatttaatatctttttgtgtttcgatggccatgtcgcttacttttgcttccccagaaagaactttagctgccatcaaacctgtttggtaacccaatttatagtagtctacagaatatgttgctacaccaccagtcattgtcataccttcgtcagctgcaaatactggaattttagcagcatctgtaatttgtgctaagttagccatagcagatgctaatacattatctgttggtgtataaatagcttgtacatcttggtttacaagattggttgctgcttgttggatatcgtttacgttggaaacggtagcttctacaacagtgataccttttgtagcggcataagctttcattttttcaacttgtaattgtgagttgatttcagaagatgtataaattgcaccaatgcgttttacatttggtactaatgcaatgataagatctacctctttttcaacaggtgtcatatcggaagtaccagttacattcccaccaggatgttcattagattgaacgagtttagctgttacataatctgtaatagccgtacccataattggaatatcatgagatgcgtttgccatcgtttgagctgctggcgttgcaatcgctagtactaaatcttttttatcagatacaaaacgttgagcaatactattcaaattagattggtcagcttgtgcattttgttggtcgattttaatattttccccatctttaaagcctttggatgcaagaccatctacaaaacctttattagcagcatcaagagatggatgttctactaattgaataacgccgattttcttttggtcaccagtagtagtattagaaccacaaccagctaccattgccataacagtgatggcactaagtgccactgcaataccttttttccagttcatgtgtaactccttaccagtaaagtactaaatcatagttgctttgttcatcaaatcctctggtaaggtgatgcccaatttttgtaatttatctttattcacaactaatttgaattctttttgcatttcgataggcatgtcttcgactttagcttcaccagttaaaaccttagctgccatcaagccagtttggtaaccaagtttgtagtagtctacagacaaggacataaccgcaccgccttttacgtggttgtcttcaccgccgaatacaggaatttttgcaggatctgtaatcgctacaagattgctcatagcagatgctaccacattatctgttggtacataaatggcatcaacacgttgagatacaaggttttgagccgcttgttgaatatcgttcacattggaaacagtaacttcttcaaccttaatgccctttgtagcagcgtaagctttcatcttctctacttgaatttgagaatttacttcgctagagctataaatcgtaccaattgttttagcattaggtaatactttcaaaatcaaatcaacttgttgttccacagggttcatatcggatgtaccggatacattaccacctggatgttcattagatttaacaagtttagcagcttcgtaatcggtaatggctgtacccaagattggaatatcatgagttgcgtttgccatagattgagccgctggcgtagcaattgctaaaatcaagtttttacgatcagatacaaaacgttgtgcaatactgttcaagttagattggtcagcttgtgcgttttgttggtcaaaggtaattttgtcagataaacccttttccttaagtgcatcaacaaaacctttatttgccgcatctaatgccggatgttctacgagttgtacaacgccaaccttgtattcaccattagatgtagttccatttgtgccacagcctgtgaaagccatcaatgctgccgccgtgagcgcgagggcaatgccttttttcaagttcatggggatttccttcctatattcgaaataataatacttctattataaacaactttgagcactacatcaatgtatcaggctaaagtattttacatttgtccttatgtagcgcacaaaatatataaaagctttatcatttatcaagtgaagctaacatatcctctgttaattcattggccgctagaatgtattcttttagtgtccccttatcgagggccaccttcattacgggcacttcaaatgggtcaaggatgacacacattaaaatttctcccgttacataatagcccacaacggcttctccttcatcttcatctaaggtttcccgtttaacagtcacacaatatggtttcatgacctccatagcagctttagccacctcttcgcgggtagcgatatactcttttgcctttgtttcaggaatatcaaaaatatcgacctttacggtcttaacctctgttgcctctcccttcgccgcctcgatagcagcgcctaattccgtttgtttcatcctatacctcacataacatggactttcaccaatggtgaaagccccatcatactagattgtttcatcatctgcattcaaaaatgctacgtaacaacgttttgcttcataaatatcggccttagatgtaacctcccatggtgcatgcatactaagaacagcaacgccgcagtcgattacattcataccatataaggccatgatatacgcaatggtgccaccaccgccaaggtcaaccttgccgagttcagccgtttggtatgttacgttattagattccattacacggcggataaagcccatatattctgcattggcatcgttggaaccagatttaccacgagaaccggtaaatttattaaatacgacacccataccgaggtaagaagcatttttcttttcaaaagcagatgcatacaatggatcatatccagcactaacatcagaggatagcatacgagaattttccaatgtacggcgcacatttactgaattaggtttacccatcaatgttaagatttctgctaccgcattttcaaagaagcgagattgcatgcctgtagcaccaacggaaccaatttcttctttatctaccaataaacaacaagtcgtacgttttaccttatcaacttcgagcatagccaccaaggatgtataagcacagacacggtcatcttggccgtatgctaataccatggagcgatcaaagcccatatcgcgcgccttaccagctggtacaatttcaagttcagcagataataaatcgcgttctacaaatccatattctttttcaagaaggttattaataaatttagtaaccccttctttttcttcatctttaacaggacgactaccgatgagaagatcaagagcctcaccttcaatcaccttggctgcattcttttgcatttgttcttgtcctaagtgaggcaataaatctgtaatgcagaatacaggatcagattctgtatcaccaatattaatgttgatgcgtgtaccatctgtttttactacaaccccatgaatggcaagcggcatagctacccagtggtatttttttataccgccatagtagtgtgtatcccaaaacaccaaattgctatcttcatattgagggttttgttttacgtcaatgcgcggggaatcgatatgagcaccaaggatattcataccgagatctaaatcatcggtaccgatattaaatagcgcaatagatttatccatatgggtatagtaaatcttatcgcccgctttaattggcgtgttagatttaatcaagtcttttaaatcaacatagccagcttttttggcagcttctacagattgaatgacacattcccgttctgttttaccattatccaaaaattgacgatacgagtcacctaatgacatcacgtcttgtaatgtttgttcgtcataattatgccaagcatatttacgttccataattttattcctttctatataagcgtatatcgtgtgttatgcttttgatttttctaataattctttttggcgacgctcataatagagccgctctttctctcggttaatttccgatttttctctatatagtttatcgatttcatcagtactatgactcaatacctttgttacataaaacttggtaattcccgacttaatcgtatattttcctacctttaactgaatggcaaatgctccgtgtttcggacaaacgcctatagataaatgcttatctccttgtacccgctcaggacgtgtcgtttccaaccgactttggcaatagggacaaaaggataatcgcactcgtctatcataaacgatacgtttcttttcttgaaagttatcgtacataaagaaggtcaaacccggtggatataaaaatggatttggcgcctctttccgtatggaatcataatgcaataatgctgttggcaaatctagcttttggcagatatgtgccgtaaatatagcatcgtgaagtgcattatgagcagataattcttcagatgatatatgtaaatcctccatagcatgagctacagagtactgttgtgtcgtgccatatcgttgatagctgtatagcatctgtgcatccgcccaagaatcatagtcgatactctttaatttatggagcaataaattttctcgcaatataagaatatcgtcagcgccccaagataggagcatataatccttgccacaccattgttgaaaatgactgtaggccgccctaaatgggacaccgcgattcaaatcctgattggtgattcctgtaagggcctttacatgcttatgcatatgtggtaaatatttaggttttacatacattgtgaacgaatccacaatctctaaattctcattgagcttaatagctccgatttgaatgatttcaccggtcaacggcatccgtgctcgcttcataaagctaatgtcgttgctatatggttgattccactctaaatcaaaaataatataatccataacttacgattcctgcagtaatgtttcagctgccttaatcacttgttcttcggtaataacagaaatacctttatacttgccttctttaataacctgtttcatacttttaccaatttcataatggtccatcgactcaagtacaatagattttgcttggtacggaccatagaaaaatggattagacggtccataaagggctacgataggaacaccctgactaatggctacatgcataggtccagaatcattcgtaatcagcaagtcacaccatttcatggccgcagctaaagggcccaatttaaaagcacctgtagccacgattggcgacgtcttcatctgttctacaacaggttttaccatgtccaaatccatggggcccccaaagaatactgttttataccctttattgccaaaataatcggctacatccgcaaagcgttctgcaggccatcgtttttcaggcactgcactgccgatattaaaaccaataatcttatctcgaggcataacgccttggcttttataaaaacggaatacctcgtcattccattccttactagtctcgatatgtaatccgtgattagctacatcggtgacgcctaattgctctaatacgttaatgtacatatcagcagcatgacgtgtcttgcgatcaagacgggtatatttcgtcataaatggtctaaataggaaatgactcatccctgtcgttatcttaccgtgaattttccatgccaaatatgatgtacgttcattaggatgcaggtttataacgatatctggacgaccttggtcgttaatgcgacgagcgatttcatttaaccctttaatgctattatgacgtccttttttatcgaccgtaatcaaatcatcgatataaggattgtatttcatcacatcttgtaacttttcatcaatcacataggtgatatgactatgaggtgctgctttacgcaacacctctagaaatggagtcgttaatactacatcgcctaaatgcatgagaaaggttacgacaatacgtttgtaatcaagttccatcataaatcctttctcaacatttcagaatacacatcccataccgcatctactggaatttgtgccatacagtcgggatcgtctactagcggctgttcaggtgtagccttagatgtaggggaaataataagatgtacatgactgcccccatatgggcccgttctatgcggtgatgtcgtaccaaacaacgcgattaatggtttctttaatgcattggcaatatgtaaaggtcctgtatcagcgctgatgaaaatatggcagtgacgaatcaactcgattaactcagacatggtcgtttgaccaactaaattaatgagattatcgctcttcacatagttttctataaattgacctttttcattatcatcaggcgaacctgcaatgaccacctttttaccactttcacaaaggcgaatacataattcaccaaaatttaataacggccattccttaacaatccatcgcgcaccaggtacaacgacaacataatcatcggttacacctagttcagacagccggttgcgaatcttcccttctgctgcatggtcatgaggcattggaaattccacgccatccacttcgccacctaaggcacgtaccgtatcgagatagcgctcaataacgtgatcatatttatgagctcctactagagctttattaactaattgactgccctcgcgaagttcccaatagccatatttctcaggagaacccgatagtagagatacaatggcacttttggcgatacattgtaaatctaaggtcatatcgaaatgacgactatgtagttctttacgaagattccataaataagacggcgattttaattgtttcttatcgatgacaattacttcgtccacccaaggggtacctggcaagaggctcgcaaattgttcatgtatggcccaggtaatttttgcgtgcggcaaattttggcgcaatgcatataatgttggcaatgcgtgaatgacatcacctaaggaactcatttttatgatgagtatattggaatagtccttcataataacccctctatgaacgaagaatacgcacaaatgtggttcattcaaaaattaatgctttaaaatctttttcatgaaatgtaatagattggattctgtaaacagatatccctttactcctgcagcctcagcagcatctacatcacgttggctatcaccgatgagaaaactatgttctacatcaacatcaaaatccttgatagcttgcaaaatcataccaggctttggtttacgacaattacaatcgacagcatagcgttctacagtaccatccttgtgatgtgggcaataatagaaatgcaaaataggggcacccgctttaaatagttcattccccatataatcatgtaggatttgtacatcggtttccttataataacctcgtgccacaccactttggtttgttacgactatcagttcataaccagaatcatgggctaatttcaatgcttcttttgcaccatcaacccactgtagatccgctatcttatagagataggaaacatccttgttgataaccccatctctatcgaggaataacacctttctcatactacatcctttacaattatcaaagaattgacattaatctgtcacaacaaattaacgcaagtaaccttcgttattatctaataattcacaatattcttttacggcatcagctaatggtgtaaagcctttatcatagccagcagccatcaatttagtcgtgtctgcttcggtaaagctttggtatttaccaatcaacacttctgggaacggaatatattcaatgcgacctttaccattatagtcaataacagcttgcatgaattcattgaagctatgtgcgtgacctgtaccgcagttgaatgtaccagaaatttcaggatgttcccagaaatagaagtttacatttaccacgtctttgacatagataaaatcacgtgtttgaccaccattttcatagccatctgtgccttcaaacaaattgataacgcctgtttcttggttcttatagaacatttggcgtacaagagatgccattttatccttatgtgcttcattaggaccaaatacattgaaataacgcaaacctacaacttgcgctgtatattcgccttcaaatttacgtacatatcggtcaaataatagcttagaatatgcatacggatttaaagcttcttctgcttctggcttttcaacaaagccatttgtaccattgccatacgtagatgcagaggatgcatagataaatggaatagcacgatcttggcaatagtggaatagatttttggaaccttcgtagttgttcttcatcatatatttgccattgtattccatcgtatctgcacatgcgccttcatggaaaatgacttcaataggacctacattgaatgtgccgtctgcaatggcagcatcaaaatcatcacagtcaatgtaatctaaataatctaaattttggagattgcgaatcttacgaccatctgttaaatcatcaacgattaaaatatcattgcgaccgcgttcgtttaaggctttcacaatattactaccaataaaaccggcaccaccagttacaataatcataatttcccctccttagccatcgtggctattttctttacgatatccgatgtagagtatccttctttaaatgaaagtacctctacttcatctacagattctctaccaacgatatcctcttttttataatcgccgcccttaacaagaatattagggcgtaagtatgctaataattcggcaggtgtatcctcctcaaaaaggacaacaccatctatacattgtaaggcgcttaataaggctgctctatcctcttcggatacaataggtcttgtttcaccttttaaacgtctaacagatgcatcagagttaagtccaataatgaggtgagccccaagttgtgccgcctcttgtaaatacgtaatgtgccctcgatgcaagatatcaaagcaaccatttgtaaatacgacggtttcgtccatgctttgccatttatcgattaacgccttcatttcttctttcgtatataaaggactagatgttgtcaattggcgtacagagcgccataactcaatcaactcttggcgatggattggatatgttcccaccttagatacgacgataccagctgcaccattggcaatatgtaatgctaaacgcatggataaaccactggctaagcatgaaatcatcatagctacgaccgtatcaccagcgccactcacatcgaatacatcctgttgtgttgctggattatgccaagttctaccatccttagccacaacggtaatacccttagcggaacgagtaccgataatatatttaatattaaccttattaagtacttccttagccgcctcaataacagatgcatcatcatttggaatcacacgacctaatgattcacccaattcttttacattcggtgtaatacatgtagcaccatcatatttggaccaatcagcacccttaggatctacgatggtctgtacttggtaagtgttcgccaacttgaatacatgttgcaacaatgtcggtgtgcatacgccttttccataatcggatataacgatgccttgtaatccacgttgacaaagctcttctagccaactgattaattgttcttcttcagcagctgtaataggtgtaattgtttcaaaatcgaggcgcatcatttgttgacggtcacctaaaatacgcattttagtaatcgtagaccgactttcatcatggatgaggccggatgtatcaatatgatcagcggccaataagttatcgagtactctaccatggtcatcgacaccagctacggcccctaaatagacatggcaatcgagattggctaagttagacgctacgttacctgccccaccaagtacttctttcacagaggatacgcgattgaccggcacaggagcctctggtgaaatacggctcacatcgccaaatacataacgatccaccataacatcaccgataactgcaatgtttaggttcggtaatgaatttgtcaaaaactcattcactgtttttgtaatcataggtcccctttcaagaaatctgtgatttcttccctatctcgattaataatcttcttcaataagttcgcaaatgatatgaccagctaaaatgtgcatttcttgaatacgcgccgtaacagtacttggaatagcaagtgtaagatcgcataattctgccaatttaccgccaccttcaccggtgaaagcaatcgtgtgcatacctgtatttcgtgccatttccacggctttcacaacattttttgaattacccgatgtggaaataccgataagtacatccccagaacggcctaagccttcaacttgacgcgcaaacactgcatcatagtcataatcattggcaacagctgtcaaaatagatgtatctgtagtaagcgcaatggatgcaagagagcggcgttcctttttaaaacgtccaataagttctgctgcaagatgttgagaatccgcagcggaaccaccattaccacagaataaaattttattgccactattcaaagccacaatacagcggttagcaatttcttgaataacatccatctgatccattgttttactaaacacatcaagatggtctgtaaatcgatccgcaatgattggatttatatctgtcattataaaatctcctttagtaggcgatccgcgtttttccaaaatagtttttccgtttgttcttctgaaagcccggcgcctctaaatgcatcatacaaacgatgcatatctgaaatatcctcaatttctgtatttggcttgataccatcaaaatcagtgcctaaagcgattacatcttcaccgcccttattgatgatatacaatccgtgcttcacaatatcatcgatgcgactgatgggtgaagtccctaagaaggattgagcaaagttcaaaccaataacgccacccttttcgccaattagacgaatcaagtggtccggcaaattacgacgatgagctgtcacttctcgcgcattagaatgagatgcaataaaaggcacatcaagaatatcgcctaattgttctgttcccccatcattaagatgagaacaatcaacaatcatgcctaattcttgcatccgttctacaaacgcaatgcctgtttcagtcaatttcttatgagaatctccagtattaggttcccccaattcattaggataattccaagtcaatgtaataagtcgaacaccatcagcgtaagccttgtctaacttagctaaatcgcctccaagaactcccccctcttcaatggataataaagcagctactttatgattttcataacatgctgtaatatcatcataagaacgcacatgactgatatagtcgctatatttttgtatctgactatcgaacaattggcgcatagattcatatctaccatacgaatcgtcttgttcttctaagtctacaaataatgcaaaatcctgtagtcgactatgccctttgataaggcgctcaatatcaattttccagttattagaaaataaatcaccatcatgagggtggtcgattaattgcattatcgtatcacaatgtaaatcaatcatatattcacgctatttctttgcttttttagcatctaatttttttaatgctttaagttcagccataaagctgtcaatattatcaaacttacgatatactgaagcaaaacgtacataggcaacttggtcaatatcttttaactgttgtaatacaagttcaccaatacgatctgtagaaatctcttgatttacttcattgcgaatgtctcgctctacattattgaccacttcttccataacggacataggcactgttcgtttgtcacaagaacgtaacaagccatttaacaatttaccacggtcaaataattcacggcgaccattcttctttgctaccatgagtggtacttcttcgatgatttcataagtagtaaagcggcgtccacaattaatacactcccgacgacgacggatactatttccttcatctgtcgttcttgagtctgttaccttcgtgtctgtatgttggcaataaggacatctcattagctaatactccttttctaatcagtcagtaatcatgaaaaaggcacaatacgcctattttcttataccttatatagtaccatatttagtaggaaaagtcccccatataatacaaaagagtattatatgggggactttttttatgcacttacgtgctaaatcgtatgaaattaacgtttaatagcatcttcaatgtgtaacaagcaatcaccggattcgatacggctgccttcacgaacaaggatttcttcaacgataccaccgataggagctgtaattgttgtttccatcttcatagcttctgttacgattaatggttcacctttagttacggattgacctttcttaactagaatcttaacaacagaaccagacaacgtagcaccaatttcaccagggttggattcatttactttacgacgaacaacgccagttgttttagcatgtttatcatgaactttaatagaacgtggttggccattgaattcaaagagaacgatgcgattaccatcttcatcaggatcggatacaccattcatcttgataattaatgttttacctttttcaatagtaacttgaatttcttcaccacgtttcataccaaagaagaatgttggtgtatctagtacagatacattaccaaagtctttagtaaatttagtgtagtctttaaatactttaggatacaagcagtatgcacttacatcttcatcagtagtattagcacccatttcgtttaattcattacgaacatgttcgaaatcagttggaggtaatactgcaccaggacgaacagtaatagggcgagcacctttcaagatgattttttgaagttcttcagggaacccttgatatggtgtacctagacgaccttcgaagaattctactactgattgagggaaatcaagagtatcacctttttcatagatatctttttcagtcaaattattttgtaccatgtacaatgtcatatcaccaacgactttagaagaaggtgttaccttaatgatatcaccaaacatcatattaacttggtgatatacttttttaatgtctgtccaacgatcaccaagtccaaccattttagcttgttgttgcaagttggaatattgaccgcctggcatttcatgttggtatacttctgtatttggatatttttcagctttatcaacgcctctgtagtaaggacgaatactaccgaagtaatgagacatttcttccatgtagtcgatgttcatttgtggttgacgttctgtaccagctaaagcgtaatacatagaattcatgcttggttggctagtgccattagcaaatgcagaatatgctaagtcaataacgtcaacaccagcatctacagcacgtccataagaataaatagtattgccagaaccttcatgagaatgcaaatgaattggtactgtcacagcgtctttcaaagcggatactaagttgtatgcagcttgaggtttcaacaaaccagccatatctttaatagcaatgatattggcaccagcattttgcaattctttagccatttttacatagtaatcaagattgtatttaggacgattgctgtcgagaatatcgcctgtgtagcacaatgcaacttcagcaatcttattttgattgcgaacttcatcaatagcaaccttcatattgtcaaggctattcaagctatcaaatacgcggaatacgtcgataccatttttagcggacaattgaatgaaattacgaactacattatcaggataggatgtataaccaacggcattagcaccgcgaatcaacatttgaagcaatgtattaggcacttctttgcggaacatgcgcaaacgttcccatggatcttcgtgcaagaagcgataggatacgtcaaatgttgcaccgccccaacattctaaggagaatagatttggtacacctttagcggcatcgccagctacgcgtgccatatcgatggtacgcaaacgtgtagcaaataaggattggtgagcatcacgccatgttgtatctgtgaagaatacttgtttttggtcagccaaccatttactgaagccttctggacctaattcatcgaatttttgttttgtaccaggtgcaggagatacatccagtttagatggcaattgcattggttcaaaatcaggcacttcttgagggcctgcaccggagtaaccattgattgtagtatccgcaatgtagcgaagcaatttagtaccacggtcacgatctggttttaattcgaataattcaggatggtcttcaatgaagttaactgtgtagttaccgctttggaattcagggttttcaagaacgttaatcaagaaatgaatgtttgttttaacgccacgaatacggaattctttcaagcaacgaagcattttacgaatagtttcttcgttgttaggaccaaatgcagtagcttttaccaatagggaatcataataaggtgttactacagcgcctgtgaaagcattaccggagtctaatcggataccaaaaccgccggaactacgatatgccaagattttaccagtatctggcatgaagttgttcttaggatcttctgtagtgatacgacattgaattgcagtacctttacaaggaatttcatcttgttcaggaatgcctatttctgggctgtgcaaatcatagccttcagcgatacgaatttgagaatgaacaatatcgatgtccgtaatcatttctgttacggtatgttctacttggatacgaggattaacttcgatgaaatagaaggaaccatcagaagttaccaagaattcaacagtaccagcattaacgtagccaacatttttcatgatttttacggctgcatcacatacggctttacgagtttctaatggcaatgcaaaagctggtgccatttcaacaaccttttggtgacggcgttgtacagagcagtcacgttcatgtaaatgaacgacattgccatgttcatcacctaagatttgaacttcgatatgtttaggttcaacaataagtttttctacatatacatcgtcatcaccaaatgctgctttagcttcggatttagcacggtcataagcatcgcgtaaatcttctttgcggtgaacttcgcgcataccacgaccgccaccaccgtttacggctttaatcatcaatggatagccgtgagtttcagcaaattcttctaattgtgcaaaatcacgcaatgccccatcagaacctggaatcattggaatgtctgccaatttagcttgtgtacgagcattaaccttgtcgccgaacatattcaaatgttctacgtgaggtccaatgaaaatgatgccttcttcactgcaacgacgagcgaactcttcgttttcggataagaaaccatagccaggatggatagcatcaatgtcatgctctttagcaatgcggatgatatcttcaatatccaaataggcatcaactggttttttaccttccccaaccaaatatgcttcatcagcttggttacggtgcaaggacaatgtgtcttctttagaatagatagctactgttttaatacccatttcgttacatgcacgaaatacgcggattgcgatttcgccacgattggctaccaaaacggatttaattttcttcataattgcctcctaccgagtcctatcgaatgatagatttgtgtgcattgatatacattgtatgtatgcatatcgaaatacatgttttacttaaacatttatcactttttttgatatccgactatgaatcaaatatacttatattatacaataattttcagatattaaaagcattaatcatcaatatggttatatttataaattatttaacctaatatagaaattattctattcattaatttttcatatgtatttttacatacacaggatgtggaataagattatatttatgtaatttattcatcacccaagaaatgttgcattaaatgattcaattgttcttggtcacgagcccccatcgtttcaacagcggaatgcatagccaataatggtaagccaatgtccatcgtccgcattggtaacatagctgatgaaatagaacctacagttgagccgcctggaatatcagaacgattaacataaatctggtaggctacattagcttcctcacaaaggcctttcacaatggcaatagcctttgcatcgcctgcataagattggctacaggcctgttttaatgtaacccctccattgagtaccgggaaattggtaatatcatttttctctggataatttggatgcaatccatgggctacatcagatgaaatcatgaagccacgagccacatctagatccatatcatcacggcttaatcctaaactgcgatacacacgttctaataagtttggcaataacatacctgctccgccttgtttagtacggctacctacctcttcattgtcgaataggattgcacagcgaataccgtcaactttatttttctttgcctctacaatacccgcgagaacaccgaagcaagacgttaaattatcaagtcttggagaactaatgaaatcgaaatctgtaccaactaatgcaccttctgttacaggatagagtgtaatttcataggatagaatttcagatgaatcacaattaatctcgtctgctaaaaattgattccatacctcttcctcagattttgtcgtatcatcatctgctttcatcatgatgataggtaacatttctttttggcgatttaaggctaccccatcattcacattacgattcatatgaattgctaaattaggaataatagcgattggccgcttcgtatcaaatagaacagaatcaacatcatatgggttctcaccttttaaaacaacggtccccgccgcacctaaaggtcgatctaaccaggtattttgaattaatccaccatacatttcaacattgagctttgtgtacccttttacatctgtaataggattaggttttacccgtatagcaggaaaatctgtgtgagccgatgcaatgcgtaaggaatgacgatagtcctcgcctatgtgaaaggcaaataatgtcgtaccatatacattaactacataatcactagatgttaaattccaaggttcttccaaggataactctgtaaatcctgcatctaataatagctgtaaactggtgtctaccgtatgatacggagatgtacatcccttgatatattttattaattgaggattatcaaatttcatatgacctcctactcaattattacatgcaaattgttatgtaatatacataatctattgccattgtatcacaaaaacgccgtcccacaagggacggcgtcatgtatacataatcgtatacgtttatgtaattatgtgttaccacataccaattgctttcatccaaatagaacctaatcctacaaagatgattaagttgataacagatgagaagaaaccgagtttccaccatgtgttttgaggaacatatccagtgttgaagattactggagaaggacctgctgcatagtgagtcaaggacatacacaagttagatgtgaatgcaatcatcaacaatgtcaacattggtggtgcacctgcagagatagcaatcgcggagaatgctacgaacatagcagaaatatgagctgttaaggatgcgaatacatagtgagaatatgtattaataagtacagctataacgaaggcaataatccaagatccttctggaatataagcgcctacaagtactgttgcccatttgatgaaacctaattttgacaagaaaccagcaaagcccatcaatgtgcccatccaaaccaatgtatcccaagcacctttttcacttttaacatcgtcccaaacaagaacgctagtagcaagcaaaatagaaatacctaagaatgcaacagttgtagcatcaatttttgtgaattgagaagtagcccataacactaaagctaaaataaatacgcctagcataacccattcttggaaggacattttaccaaggccttttaactcttctttaatcatttgttgtgcttcacgagcatctttaatttcaggtgggtatactttataaatgaaatatggcattataatcaatgcaataacaccaggtacgatggctgccatagcccagtcgccccatgtgataccgataccaaaagattgaagcgctaatgctgcaaccaatgtgttacccgccatggatgtttggaacatagcagatgtaattgtattcacttgataaatggattgcatcaagaaagaaccaattttacgaggtccatcttgaggttcagaaccgaacgcttttgccaagcttgtagtaatcggcatgataacaccacctacacgggctgtattagatggagttgctggagctaaaattaaatcagataatgctaatgcataagccaaacgcaaggaactactaccaaaagcagcaatcaaattatacgcaatacgtttccccaaaccagttttaataaagccacgagagaataagaacgcacctacgattagccaaatagcagagttagcaaaaccagagatagcttcgccgattttcaaagtacctgtcaaagcagccacagtaattacaacgatagatacaccgccaattggtaatggctgcgtaataaagcctacgatggtagcaacaaagatggcgaataagtgccaagactgaggtgttaaaccctccggcgttggaataaaccacaggcctataccaaagaccgctggaataatccagttcaatagttttttcatacacatacctcctacataggaaaaaaaattaaactttgtatgaaaaaagctgtgcatctaaaactatgcacagctttcatcgtcatatatatcctactcaggcaaagatacatcctctaaatttgttttgtcgatagactcaatatcacctttatcgcataaatttgcaatattaggatcgattggtaaacggctcaacaataatagaccatatttttgaagaatttcttcaatatggctttcaccaaagatttggtaatccttaccattatctggacaatggaagtaagagtagttttctactacaccgatgataggcacttgcatcaaatcagccattttaactgctttttcaacaatcatggataccaagtcttgaggagatgtaacaatgataatgccatccaatttcaaggattgatatacagtaatcgctacgtcacctgttcctggtggcatatcaacgaataaataatcgatatctttccaaataacatcactgtagaattgttttacaacattgcctagaataggaccacgccacaatacaggatctgtatcattttcaagcaacaaattaacagacatcacatcaatgccatattgcttagttttaacaggatacataccaacttcgtcagcgtaagctttttccttgataccaaacatcttaggaatggatggaccagttatatcagcatcaagaatacctactttataacctttacgagccatcgttaaggccatcaagcttgtaacggaggatttacctacaccacccttaccggatacaacaccgataacatgtttaacggaactcaattcatgcaatggcgccgtcatatcttgaggctgttgtgcaccaccgcaacctgcggatttggatggacaactattgcaatcactactgctgctaccgcaacccatagtaaacacctactttcttcgaggacttccctcaacaatatatagttagaaaattattatctcattgtaaatatcgttcattgtgaaagctatttctacaactaacacatcatatatttacagtgttattgtatcatggtagtttaataattttcaatatacctatacgctttaaatgactaaattattcaccacaatagtcctttgtaagagcacaaaggatttccatccccttctcaatttctggaattgttggcaccgtatagctcaaacggaatgcatgaccattttgtacaccatccgctgcaaaagcaccacatttaataatgcctacatttttattcatgcacgcttcaaagaattcatcacaatcaacagtatccggcattgtcatccatgcgaacataccacctgtaggttgagtcaaatgaaccttggaactacctttgtcttttaagacacgcatcatagcatcacatttagatttatataccttccgtacattttctaaatgtgcatcgtaatcgatatggtctagtacgtgtgctaccaccttttgtgtaactagtggcatttgtcccgccgtattattttttaacgcttggatagtgccgataacatcttctgggcccaacaagaaaccaacacgcaagcctgccgataatgttttagaatacgagcctgcgtaaaggacacggttttccgtatcaaaggatttaaaggtcggtacatgttcaccagcaaaacgaatttcaccatatgggtcatcttcatagataaacaaatcatattttgatgctatggcgtaaatctctttgcgacgttctagtggcatggtaatgcctgttgggttttggaaatttggaattaaatagatatattttcccttgcctgattgagccgctttttccaactcacttggaatcataccgaactcatcagttttgataccgactgccttagcccccatattgcgtacagaattgatagcacttgtgaaagtataatcatccatgtacacttcatcgccaggttcacatacagtaataggtaccaagcccaatagttgaccagccccattagaaataatcaaaccttgaccctctaaattcatatggtgaactttcgataaacgttgtaaggtcaaatctgctaatcgcgcatccccttgcatcggaccatattgtaataaactcataggattatcatgaacgatgaagtcaaaggcatcttcgataactttcacaggaattgcctctggtgctggattaccaataccaaaactgataaatccaggtacacccacaccacgttcaaatacttcacggatgaaattaggcccttttaatattacgcgttcaggaagtgaaaaactcatagtatcgcctcttttattttaattacataaaaatacatgtttattaagcattaggatcatgttctcgttctgcattacgtttattaatatatcgtttatataccttccatagaataaaatatacaatggctgctacgacgacaataatacctagacgccccatattttcttgaaaatttacaatatctgtgccaatagcaacttcaagggctgtagacggaaatttaccaattaaatttgctaaaatatagtcacgcggtttaatcttactgatagcccctagcgcagtgatgacaccagatggaaaataaggtaatgatctagcaaataacatgaccacaaaaccattattaccggaaaaatcatcaaccttcatcaatgtggtactcttagaaattagcttatccgccgcatctcgtaagaaataacgcataatgtaaaagctgatgactaccccaatggtttcagcgagccatgaaataatgataccaggccacatgccaaacacgagaccattcgctgtggaaataaagatggatggcaaaaatcctacagcattgacaaaaatatcaaggagcatacttaccaccatggccataggaccatagccttgaatatactcggcaatttcctccatagaaccactcgttgctagatgccacatagttggataaaatgtaggatctacaatattaatgatgattagtaatacaacaaataatatgcctgctattacctgcaccaagccttcaccagaaggcgaaaattttcgttctttcatagttacctcgtttaataaaactagtactattatagcacggattctatagagtctgtataattaagtctattttaggaaataataaattttatcattacaaaattagcatatatactcataagagttgtataatacaaatatattctagttcattacgaaagaaggtttactatgatacaagttggtcaatctgcaacagcaacagttacagttacagaatctaatattgcaaaaacaatgaagtctggttctcttgaggtattcgctactcctgctatgtgtgcacttatggaagaagctgcacaagcagcggtacaaccagaattgaatgatggtgaaggcacggtaggcatctccctatccattagccatgatgctccctcccctatgggtgctacaattacagccactgctacagtaacagctgtggaagggcgaaaaatctcctttaacatcgaagcatccgatggtgttggcatcatcggtaaaggctcacatgaacgattcgtcattaacaacgaaaactttatgactaaggtcggtgcacgaaaagcatcaaactaaatcgatagatccaatcaaataaattctataagcgcaaggggctgtaacaaaacagccccttaaatttaaaaagttattagttgattatatgaaatcaactaataacttttttgtatttctaagcaaaaagggtcccgagggacccctttcgttggtataattaaattatgaacaaaaaccataccaatgaatctaattataccaaactagtaatgcctcgccaactagttttaccattggattatggcattttgataaaagaaacagcgcctgtgcggttactcgatgctgtattggaggaattagactataaagagttacagcatttgtattctcctaaagggagaaaatctaaagttccaccgcatattctgttcaaaatttttgtctatgctatgtctaatggcgtgtattctacacgtatgatacaacaacaatgcgaagaaaatattaattatatgtggcttcttcaaggctattcagccccaagccatatgacttttcaacgattttttgcacgttgtacactagatatcttaatgaatctgttttcacagatgatggaagctattaacagacgtgataccttaacatttaatgaagtctttattgatggaactaaactagaggctaatgccaacaagtatacctttgtctggcgaaaagcagtacaaaaaagactagatacattaccctctaaattagctatattaaagcaagacatctggaatgaattagggctagatacccattgtatgaatgatgaatgtatatatactttcttagccaaagaaattgaagtacaacatatggaactcgtacaaggaaaaggcaagcataaaacaccattgcaacggttgtatgagcgagctgaagttctatatgagaaacgcaaagaatacgaacagcagttgtatattatgggtgaacgcaatagttattctaaaacagatcatgatgctacctttatgcgtatgaaggaagaccatatgcgtaatggacagcttaaacctgcctacaatgtacaattagctgttcattctgaatatattatgggagttggtgtattccctaagcccaacgatacgaatacgttaattccatttgtacagcaattagaacaaatccatagtcgccgattcacatatgtggtagctgatgctggttatgatagccatgagaacttaacttggttaaaaaacaaccagtacctatcttgtataaaaccacaatattatgaaaaggcaaaaactagagcttgggctaaagatattagtaaagctcgtaatatggaatatataccagaagaagatgcatttatatgtgcaaaaggccgtaaattaaaatatgctttgactcgtaatgctaaaaacaaaaccggatttatatctgagcgaaaggtatatgtctgcgaatcttgtaaccgctgtggatacaagaaggaatgccaacggtatatgaaaccaacaacagtaaatccagtaaaacgaattgaaattacacctgcatatgatgctgtattggcagaaaaccaagacagactgcttagtaatacaggcattcaattacgaattaaccgttccattcaagttgaaggcgcatttggtgtgttaaaacaagatcttgggtttagacgatttttacaccgtggcagtggaaaagtgcataagatgttatatctactggctatgggattcaatattgaaaaattacataacagaatacaagcaggacgcgttaacacaacattatttactgcaaaagaaactgcttaaactaagaaatttttaaataggcctaaaggtctatttaggtgcgcctaaaaacaaaaaataccaagagaacataggattttacaaatctaattttcttggtatttcttatattttaaagggactgcaactagaatgcggtaaaaccgcattctgttacagcccctttaatattatattattgtatattacttaaagattagcaaatcttaactacccaaccttctggagcttcgatttcaccatgttggataccaagtaatgtatcatataattttttagttacagggcccatatcatccatgccagctggtacattgatagtgccttctggagtatcgatttgacctactggagaaataaccgctgctgtaccgcatagacccatttcagcaaagtcttttaattcatctttataaacagtgcgatgttctactttcataccaagataatgttctgctacatacatcaaggaacgacgtgtaatggatggcaagatactatcagatttaggtgttactaatttgccatctttagtgatgaagataaagtttgcaccaccagtttcttctacatgtgtacgagtagccgcatcaaggtacatgttttctgcataacctttgttatgagcatcagtgatagcatataaactcatcgcatagtttaaaccagctttaatatggccagtaccatgaggagctgcacgatcaaaatcagtgatacgaattttgattggtttagcgccacctttgaagtaaggtcctactggtgtagtaaatacgcggaattgatattcatctgcaggttttacaccgataacggagtttgtacccatcatgtaaggacgaatataaagacttgcaccatgaccataaggaggaacaaagtctttgtttgctttcacaacttcttttacagcttcaaggaaacgaccttcaggtaatgtaggcattacaaggcgttccgcagattgatttaaacgctctgcattaagatctggacggaaacatacaatgtgaccatctttagtgtagtatgctttcaaaccttcaaagacagtttgagcgtattggaatacaccagcacattcattaagaacaacgttagcatcagtaattaatccgccttcgtcccatttaccatctttatatgtagtcaaataacggtagtcggtttctacataaccaaaaccgagattattccaatcgatattcttgctcataacaataacctccatgcttattaatatacttataatcttaacactatgagcaagttatttcaacatattctatagaggtcggaagtttatctataataaacttagtacgattcaaatcataaggtacgtcgtaacgcgtatgatatgaaatagattctacacgaccagtacgaaccgtattatcggatccaaacggaacttttacaatatccccttcatatatatcatttctatcagtacgataataaaattcctggtttatcttaaaaatatatacggaacaatacgtataaattcttctatcagatgtatgatttgattgtaaaaactcttgtaaagatttatctcttgtatgagcatgtataaaattaattagatttttataccaagtgggcacatactgattagttacatttcctataaacaatgtatcctctttatgcgcccatttaatacgtactgttactataccaccacgagcagggtctctatcaaggtcatgactttcactaagactaaaggaatctagactatatagcgtttcgccaatgtgaaagtcaatatcttgcttcaattgatgaatcatttgattatctacatactcgctatgactatggctagagtgaccaaattgcttactattacaatcaatagaaatagacggctcattccaattaaaattcaatgtatttacgtcaccatattcttggtacatatttttttgcacttcaatatgaatctcttgaattctatctttttctcgatttccatcaaataaaattaatgtaggcatacctaggatttgtctgaatagtatagacatggccctcagggtattatcaaaaggaaattcatatataaattcctgatcctcagtgttgatgagctgcacttggacagcacactcatcctcatcatataggtcaatatcatcggaaaatctacgccccataagctctaatagatattgttttttagattcgtcaattgagtactccttagtagttaaggattctattttcccctctacaggtttcgagatatgctcccatttaatgccataggtaacacttatggcttccttaatagaaatatgttgtatctcttcaatatagtaatctttacgatttaattgcacttcctttggaacgctatctggtaaatcaccataccagctacccgtacttataatgtcacaagatgctacggtacctataaatttatctgtcacatttctatgcatatacatagggactcctccttttattactttgtttaagtataacaaacaggatgtgacaaaaatgcctctatataattatttcttaaaaatcattttttacattacgatttatattataattaacttaagatatatataccaaatcttaaggaggtatttcttatgaaatcaactactaaacatgaactactctctaatcctaaaaatatcatctgtataggccttaattatgcggatcatattgcggaaactagtcttgctacacatgagtttccagaaatctttatgaaaacatctaacgcattagcgtcacatcaagatatagttcacattcaagatgaaaaccttcattatgattacgaaggagagctcgtcatcgtcattggtaaggcgggtaaaaatatatctcgcgaccaagctaaagaacatatcttaggatataccataggtaatgatgtatcagctcgaaccttacaatttagaggttctcagtggattcttggcaaatccttagataactttgcccctatcggtcctgttatcgtatcacctgacgattttgattttgaaaatgctaccattaccacaacagtaaatggtgaggtgcgtcaacaagctaaattagaacaaatgttatttaaaccagatgcaatcatagagtttgtatctcagtatattacactacaagagggtgatattatctttaccggcacacctagtggtgttgtactcggtaaaaatgaaaaacgatatggttggttaaaatcaggagataccgtatctatatcgattagtggcattggtaccttagtaaatcaatttaaatagtcccccctatatataccaaaagagattacctatgatgtgtctatccatcatgagtaatctctttcttctttttctatgagtctatttaaatatgattttacaatctaatatgtactatttatgtttcgcttcaagatcaagcatgtatttcttacgttcaataccacccgcatatcctgtcaatttaccattactaccgataacgcgatgacacggaacgataatagatataggattatgtcctacagcacctcctacagcttgagcagagaatgtttctttgccttgtttttcagcaatcttcttacctatttcgccataagttgtcgtttcaccataagagatagtttgtaatatagaccatacagacttacggaattctgttccttctaattgtattggtggagtaataaatggtttttgacctttaaaatattggtctagccacataatggtcacttcaaaagggccggttttttgttcaatatactccgcatcatcataactaggagcatggctttcatctacgaaaaataaatctgttaaatacgttaatgtaccaagcattatcatcgttcctaacggactttcataggtgtatttataattcatagtacattaactccttattaaactaacaaatcattcataaccttttgtatatcattattaaatgatacagtattttcatgaatttcaaaagtagtatattatttatcccaataatttgttgtagatgtcataatctatatccttaaacacattaaataccacttgtattttactatttgtttcttttaaatatgttcgtaccgtatctatggcaatctgtgctgcttcttcattagggaatctaaactcaccagtagaaatacaacagaatgcaatggagtgtaagttataagcattagctagttgcaaacaggaccgataacatgataccagttcatttctctccttagctgttaccttctcattaataataggtccaactgtgtgaattacatgttttgctggtaaattatacccataggtcatacgagctacacctgttttctctggcatttccatatactcagtcattctagcacattccatacgaagttcaatacctgcaaaggtgtgaatggcattatcgatacatttatgatttggagaaaaacatcctaataattgattattggctgcatttacaatagcgtctacagataatcgagtaatgtctccttgccacagataaatctgagtctctcgctcttccatatcattaatggttacgatgcccttttcatgggccaataaatttaaatattcattctctatcttcatccattcaagaggcattccaccagcagggcgaatattacataaagatctaaaaagagtaaattgctcttcttcattcataggaatatctatatgttcgttatgcttctcactgtattctgctactaatccttccaccaaatagcgtaaccgtttttgctgtgtcatatgtaactccttttagtataaattatacttttacctattttataacaaaaaactgctagcacatatatatgctagcagtaactttactgtttataatatatcaaaagttatggtcttacaaaatcttgaccaccatgattaacgaggatatccccatctaaaacctttgtggtaacgttttgtagattaccttgaatttggctcatcataaaacgatatcctgggctatttacatgtttattgaaagctgattcatcgctataaatttgaataacataccagtgagttttattatttctttcacgtaatacataacctgccttataacccgcatcatcacgaacggcacgttcaatatctagttgatattgtttttgtactgtatcaacttcattaccgtctactgtaaaatctgttaaggtcacaacagattgaccgtcattaatcaaagataacgcatttggtttttcaatcaataacaaaggctgtacatcatacaatttacgatttgtcagtttagaaccaacctcgttaatatagttttggaaatgctcggatttgcggtgtgtttctaaggcagccgtatctttatatacctccactacgtatgattcagatggattaccttttacatgagccacattcattgataatgtattaggctcgttagccatagaggctgttaaattctgaacacctgcagtattatacgcaccttgtaattcgttcggtacttggaaacgatacaaacctacaataggggctgtatctacttgttcttgtttatcaaatgtgaatgcagcaaatgatgtactcacacctaatatggcaatagcagaagttagcaaaattcgttttatatatcgcttactcatcagtgactcctttacatatatcttgataatttctcggcccacaaaccaatacgtttataagttaaaagttcacatacttttgatgtaaaatggccaaatctacgataaaagaaattaaaggttaaataggctggtatcgttccgatagtcttaggcatacgacggaaaatatttcttatggaatataactcttgatatatccaaagatatccttcttctaattcctctttagacataccaagcggcgtcacaactacgtgagacgtattgtatttagataaatcatgatcaaaaattctattttgagcttccattctcttgtagaattcagtcccaggatacggtgtaacaatatgtgatgtaatcgtatcaattttctggctaataatccaatctaatgtatttttaaatgtctctggcgtgtctccatctagaccaaatacaaagctagcattgaccataatgccacgcttatgtaattcactaataagtctttcaaattcttcacgattgttttgcattttatgaacactagataaagactgaggactgatactttcaaaaccaataaataaactctgacaaccagtttctttcatcaaatccattaattcagggtattgtcctattttcatagtaaccgctgcattccagtttaattttaaaggtttaatacgctctaaaaactgtttagtccaagaaatattaccaataaaattatcatcaataaacataatatgctttgtgcctaaacttttaatatctgctaatacatcatctatattacgatttatatattgatgagttccagaactattatagcaaaaatcgcatttatgagggcaactgcgacttgtagaaacaacgttataccataaataatcagtcttatctatcatgtcatatgcaggcgctacgatatcatcccctgatgttaaaggcgcagatacatatgcagattgtaatctattatgtttcatgtcctctataatttgaggccatgtattttctgcaaaaccaatacataagctatcaaatgcatcctttggcacagaactagatgcagttgtaatatgtataccaccagcaatcaccttaacacctttttgtctatatatagatgcaatttcaatagctctaggtaaaacatctacagtaactgctatgcctaccaagtcaggcacatcatcaaaatcaatgggtctaatattttcattttcaattgtaacttcacaatcatgtcgaataatattagccaccgtcaacaaacctaaatgaggggacatgcgtatttttaaatctgtatccataggacgttttaacatacgcggttgaatcaatttaactttcatgtaaaacctcttatgttacatctatattgttatatattcaaatattgtaccatgctcctctataagcttaacaaggtctttcccttgtaaccacacggtcgcatcattttgatttggatggataccaatgagattatccttataatccgcatcaatgtagtaatgcaccttacgctcctcatcgtgaagtaagcagaatggtgatacatgacctggtttaatcttcaaaatctcccataactcttcttcagaaccaaaggatatctttttaagattgtggtccttacggaattgttttaaatctacacgctttgaaccacgaacggtaattaaatagtaatgctctcgcttatggtctcggataaataaattcttcgcatcccattctggatatggcagttctacatctggtttatcgtccatactaaatagcggtgcgtgatccgtaacttcaaaatcgatatgatggtcatgcaaacaatcatatacgccttgtttatctaacatgtctatctcaccaaatttattctggagccgtataggttccatcaaatacaaacaattcaggatgttcatgtacgaatgtgtcttcatagattccatcatattcatatactacatcatcttttttatcaaggaaatcgaacagttcatcctcattttcccaatcttttaaaatgttccatcgttcttctctatcaaatggaactgagccaccaaagtactcgatgacagtttgtaagttatctgctagttcatccatcttaaagagacgtaaaccggctagagcatcttcccatacaatacctgtcgagttatagaagaattgatgatgaccaccattattaacctctgcgaaataccaagatatagcattaagatagcgttgctctaaggtgaaaggttttgcggattctatataatcatcataagatccatatatattgatggtccaatacataggttcattaatggtccatacatcatcggtagcttgtatctcttcgacagtgatagtccgatgacgaggtacacctttacgtttcttctttttctctgctacatattcattataagcagaacacaagtcaggataatcagattcacatgtttcaaaatccatttgcaaatagcacatatcaatgacttcaaaacaatacgattttatatcatctagtttagcttccgtagctaaacgtacacctttatctactaatcttagcatctgttgcatagtattcgatgtgtacccgtcactattatccaagacaagggctccatacgcataggcacagcgataataccacaccgcatcacgatactcttcatcaatagattctaataccttaatagcctctttttcattgctattattgttataagctctaccaagctcacctaatagaggtacggataaattttccatgcccacatcagttaatatattaataacagtttctacattcccagaattattaagctctttaatggtttgtaattgctccgcatcagaaaatgcattaaattgttcaaccgttaatcccattatgtcacaccctatcatatttcatatatagtcttaaaataaacattatctagaagctagctaccacaaacaatataaaatacaggtataccgtcttcgttatctatgagaccatacccttcacattcatgtccttcgtattcgatgccttcaaagaatacgtgatcgccaagttctttattagccattaaattatgcaatttaaagagtaattcttctctagtaaaatatgtaccattatccgcaacaagatgagccataatttctacctgccacatgccatcttctttatcttcttccagcaattcttcatcggtaacacgttcattatcaaaaagttggtctaaactttcaatccaagcttcataggttactagaatttcaggttcttctaatctatcattgtcatctgcttgatcatcatctacatatttctttacattatcattatattctttggaaaactcttctcttctatatgtttgcttattaaatacccaatggactacatcatatgtaggatagttatcttcatcgcattcattaacgtcttcgacatctttaccttctgtagcatcttgactgtttttcttatcaaatacattcttaatggtttcaaatatcacaggataatcctccttgtactgtttcggcttgattttaaataggtgatattttactacttcacagcaccaaccaagttgtttatctaaatggtcttctttcgtcatttttatgcctgtttctattaattgtaatgccttctgtacatgttcagattcatagcttttaccataccctagcatgccataagcatagccacaacgatagtaccaagaccaatcgcgatgtgcctcatcgatacgttcaaataaatcgatagcctctgctgcacggccattattgttatacatacgtcctaaggcacttaacaatataggcgacaaattatcaatgcctatgttagttaataactccatcgcacgcttgaaatcgatgccctcttgttcattaaggagcttaaccttttcctcatcacttaattcttgaaactcttcatccgtaatgtcttctatattgaaatataagttcttaataaagtcaccaaagttatctgctaagggagtcattgagtaatcacattcttgatctacccgtacaaccttaggttcaccggttggaccgcactcacgataatcgaggaaaatcatgtcgtgaccgccggaaattgtatcggctacaacgataccgatagggggatattttacttttgaaatccaaaattcattacccatctcacctaaaagagagtattttttatctctatcaatgccatatattcctgttatatatacacaatcgtcatcatcgttaataaaacaattcttatttactacaccaccattatggtttttaagtagttcaatatatgctgcaggcaatgtatagcctagttcagcttcagcattcttaatatcctcatcggtaacctccctacctatataggactcaaatgcataatcggtgtctttccaaaatccagtccaattgaaatcttttagatgactcataatactctctcctaaacaaatagatataatctaaccacattttatttgatcaatggaatatttttttattaaagctttcacctcgcgtcgtatcaaaatggtatctataatataggaaaaaatgatataaggagatacgttaataatcccgacaggggccaatataagagctgcccacaataaattcagtgaatacgcataccacttaaaatcaatggtatttaaaaatggtataacatagtcaataactcttacttcccattgcattaatgggttcaattcctcacttgtgcctaatagccaagcgaaagtaagggcaaatattaatgcatatactatgccaacaggaattaatatcttcgctctctgttttaacagattgcgataaatttcatcttcttcctctggtgctatatcatataccatattacattgaatctgaattcgtctaaatcgatagcgaatatacttatacaaaaggttattcggtgtatataacataatagactccgcatgctattgatagtaactaaatcattggagaatatattatccatctatggcaaagtaatgtaaatctttgaattcattatcccaaaatgtaaaggaaaagatgtgcgtatcatcaaaggtttgctcacaataggtcacagcatctcgctctggttcaataataggcatacctatccgtgttttcacttcatcaatgtttacatcgccataccaatcttggatttcgttatgaatgaaagtaacaatagaatctatattcttatgataattagtagctaataatttagcagtatctacattagcatctgttggcttctcatcccaacaaaattgtatgccttcataggtcaatgtatattgccttaaccgttcatcatatattatctcattaatcattttcagtatcctttacatagctttccatcttaggtcttaaatctaacacgatttcccaatcatctaatgttggaaccttatgatgtgcaataaagtcttctatgatctgtaacacctcttggtggcctagttcatttttaccatatatgatggcaccttcttcgtctatagcagtaacactaatttctatatgtagtaattctgtgtgttgatcactacaaacttgtacaaaattatatagcttattacctactgaaatagcctttgatggtgaaacaattaggaagtccatatcattatcttgaatagaatataaattttgctctacttctttcaaggttatgccttcatatttgtactcacctacatcaatagaccaatccgtatatgttttctcaaatgtatctatcatatgtatcgcctctcctttacgatatccattaaaacaaaatttctaattgccttgccatatccgctataaactcatcaaatttacagatctctcgtagttcttgatgttccatatcataacaggaaatctttttagatttagggtcccatacaatttgataatcgttgtactcacctagctctttagataaacgtaatagtttacgacgcccccatttaaatggaactgtatcaagtaaaggtaagaactctatagagataaaatctgagtctggcaattcaaagtaaagattatctccctctaaaaaggatattaacacttttggtagtttaaatggttttaattgatccattttattctgtttatcatggtactcagcaggctctaaatttttaaaatattctgccatttccatatcgcctttttcaatagcaatactatagggacgcattccatccttttctgtgatggttacatctgcaccatgttctactagatatttacacatctgtaaatgcacataccgagctgctacgcacaatggcgttggattaaaaggatataccgaatcaggtttattgtagttgatatctacaccattattaataaagaaatctagaacctcgtaattttcgtctgtaatggcatttctaaaggctttaccgccatatttctgtactgtatggcctaagtcatgaatgagttgtaagttctcatatttcttgccatataaggcagcttgaaaggcatctacatccacagagttcaaggcgttaatattggccccttgagctacaacatagtctataatctcttgattaccataccgtactgctaacaagaaacttggattttctttatcatttaaatctgcgccatgttcaactagccattgaacacttggcaaacagttcatcactaacgctaattgtaacggtgcatactcactatatttaccaatttgtataggttcatctatatcccaaccaccttgtaatgcactttcaagtgctgttatatttccatttataatggctgtcactaaatctggtacaaattcaaaagtgcctaaatccttaagatgtatcatatccctctctcctatatactatttacttacaccacaactggtataaacttctcttcaaaggcagtcaatatacctaacagtttagtatctaaaaatgacaaagcctgttttctaatatccgttggaataccataatatgcctgtgctacaccaccacaaatagcagcaacagtatcactatcaccacctattgagatggcattacgaatggcatcttcaaaatcagtggattcaaaaaaggcttgcaatgcttgtgggactgttccttgacaactttcattaaacctataggtatctctgatttcatccaatgtgaaatccatggtgtaataatgctgattaatataatctctgatttcttgtatatctttaccagttttagctaagtatacggcaactgctgtcgcctctgcacctttcatgccttctggatggttatgagtaacctcagtaactaattgagaaagaagctttgcttcgtccaaactatgtgctgcaaatccagcagcactaactctcatagcagaaccattaccataactattatatggctttggattctctgcaaaaatccatctatagaaccgatcgccatatccataacctggatagcatctcccaatcgtctgcatacattccactgcattttttgaaagatttctgtaatttggttggctcataagaattgcctttgctacagcaagtgtcatgatactatcatcagttaacacacattgatctgtaaagaaatcaaagtccttccgtctaatattattaaattcgaatcgtgaaccaactatatcaccaatgattgctcctaacatgttaatccctctctgaatttgttgaatttattatttagctaatttttatcgtattaactatatacataaatgttccgccaatactatctatttagtttaattatattacatttataagtatgagtgtatagtaaaagccctttgcacaagcaaagggctctatttatataattcttatttaatctttaatgtatatagaattatttctttgaacgctctaattcttgaatacgtttttctaattgagcgattctttcatcagtggatgttgtatttgatttagattcagatcctaccttaaagctaagcccaccattaaatccttggttgccattgcctactacagtacctacattaaattgtacatttcggcttggacgataataagcacctaatgcagtagctgtttttccatgataatgaccaaatcctacggctacacctaatccagtttctccttcagagaaattcggttgtaatgcagctaatgcatagctagatgcagttgctttattaactgtagattcaaaatttgtacctaccgattgtacttggctaatagcattttccaattgacctactgtagctgcatcatgtgcatcaacgccatcagctactttcaccaaacgattatatttagcatctgagtatgtagtaggtgttactgtcggttctttatcataatctggcacagtctttttataacctaagtgtgtggtgatttctttatctggatattttactgtgtaaccagaaacatcaccagcatcatgaccaaatgcaatagtaccttcttcggtagctacgctttcataaccaatggcagtgccatatttgacagtagcacctgccttataacctaacgccaaactgttctctgccttagtacctgtaaaaccaccgcctacagaggtagacgcaataccaagtgtcattccattcgaaccacccacaaccgtactaccattgcctacggtcatagcatcacgagatccaacgattgtactatattcaccatttgcaatatttttatgggtcacaaatttacgacctgtaaattcacgaccgccaccgccaaggatggatgcgccagtacctactgcttcatttttactgcccccaaatacggaggaccacataccaacaccggtatttcctaaaccgcccgcaagtgtacttcccttaccatctgcattattttgagaaccgccaataacagaaccaatttcaccagccgcattattaccacgaccgccagctatagagctatgtaaaccatatgtaccattagaattaccacctgaaatagatgaggactcaccatacgcaatattatcctccccaccgctgattgtggcataatttcccactaaggttcctactgcttcaatctgattttttgtaccaccaagaatgaccccatttttaatttcttcgtgaacaatattttgaaagccccctacaatagcggtataagggccttcggtcatattttttgttcccccaaggactgcactattttccccttctgcaagattaggggctttatctttaccgccactgacaacgacactaccatcacctagtgcctgattacctgtcgtataaccaccaattacttgaccggctgcatttgcactaggtgtgcttaataccataaccgagcctaatgttaatgcaaatgcacaagcagttactgcggtactaaggctctttacgttcttaggattacatttatgggaatttatcttaccagttaacatcatttgtactttattcatttctctcttctctctctatgaatatacaaaactaattacaaaattgactcctttcttgatatacacaatacacagatcattttctgaataatttttattcaaaaaaattcataatataaattaattataaattatttttgttttttatataattagcattacttatactcatataactactattcataataagttagtcgtcccaatgctatactaaaaatgatgtgttttaactatttatcagtgtagagggtcataaatatgaaaaaaggtaaacgaaagaaaacagtaactagttttaaacaaactaatacatcaaaaatcatattattttcaatgattttaacggctatgagcgcatctattgtatatgcagcagataccaacgtggccgatgaacctaaagtatcacataccatcacggtaactgctactagaactatggaggatatcataaaaacaccaagtgctgtatctgttgtaacagacaaagatattgaaacacgaagagttgataccgtaacagatgctctacaaatgttacctggcgtgtataaaagccaaaaagcaaacggtggattacaaattcgcggttttgattctactgacatcttagtattactcaatggtgtaccaatgaataacacctttaataatggtgttgattgggaagctataccagtacattctattgaaaggatcgaattagtacgtggtcctagctcctctttatatggtggcagaggtgttgctggtgttatcaacattcaaacaaaacaacaacaaccaaaacaatctgtaaaagatatccattggcatggacaaattggatatggatctcatgggacactaaataatgagttagggtttgatgcacaagtatctaatcgtattactgtcggtatgtccggagagcaaagaaaaacagatggttatccaggtttctttattaccggcagagctgccaacataaggccgtctactgtaacagttacatcagataacccagttccacaaaccaaagatggttcctatctattaggtagtcgaggagataagtcatttaataataagaatctatctgcgtatgtaacgatgaaactccgtgatagagaatcattaacctactcttatctatatacgaaaaatagatatgcttatgagaatccaatgagtaccataaccgtaaatggtgcacctatcttctctggaaatgtcaaaattaacaatcaaaaatatgtagcacttagaacaagtagatacttaggctatgatggattaaaagaatatcatgctcataacctacaatataaaaatgacaaaaataagctacaagttactttcaatatattagatcgaaaaaaagatggattctctagccctagcaatccaaatacacctaactacagcggccctggtgatgattcattctatcctggaaaaacaattaattttgatgcacaaaaagtatgggatcgtatggggaaacatagcgttgttgcgggcattaactggaaaaaggaaagctttgagcaaaaacgaagagaattaactaattggagaaatcattcttcctttgattcaaccacatatcctggtggattgtatgaaatcaataaaggtgctacaaataatttagccctattcgtccaagacacataccgtcctaatttcaattgggctatttataccggacttcgtatagaccgattcaaaaaattcgatggtcaacatgttacctatgatacgaccaataatagatacgacaccgtaaatcatggtgaaggtagctatactgaatggagtccaagattagcaattgaacattatgtaaccgattcgctaaatgtatatgcttcctatggtcactcttttaatccaccaccacttagtcaagtatatcgttacacagatgtagtacgagcgaatccaaatcttgatccagaacgttcagatacatttgaagttggtatgaaaaaagaatggggcacaaaaactgcattaaatctatctgcattctatgtaaaaacgaaggataaggttaaatatgtaacacattatgataataatggtgatgtagattataaaatgtatgaaaatgtagaccaagaaactcgtcgcggcatagaattagaacttcgccaccaactatcctcaaaatggtctgtatttggaaactatacatggcaaatgggtcgtataaaacataaagatcttcctaacacaaatgcaagcggatatgaggaaatcaattatgatatacctaaacacatcttccatgcaggtcttgaatatactaatggtaaatggaatgccctttgggatgctcaatatgtaagtcgtcgacaatcagtagatgatattacaggtcaatacggttcctcagatagctactttatctctaatgtagcaatgaattacaaattctccaaagaagcgacattacaattaggtattcaaaatgtatttaatcgtattttctacgatgatgaagctaccgcaggccgtacatattctgcaagtatgaagtttaaattttagtaatcattcatcaaactttactatataacttctatttgatttaaccacaaccatataaaatctatctaaatttaatatataaaagcaaaaaaaggtccatcgcatatcgtttctatgcgatggacttatttattcttcttcaattattattccatttatatatgcaaattcaatcatagtggatccataaaattcactcacgcctaatgaaatattttctttaggaatttctttcaactgattataaaagtcaatatacatacttcttaactcagaatttttgattattttattaaaatattgttgagctttatcttttccaccataatgataaatataatacggtagattataatcgtttatatctccctctataaatttttcaatattacgttctgtatcttcaaaatcttcaaatagcggtattatatattcctcacataacttgctaacttcatctacagtatattgatagctagcacctgctaattgataccaatgccattccgttctatttaacaaacgacctaattctccgccatatacaaacccattatgaatattagcttttttcatagatttagaataaatggcaatatgtggaacaaactctacgctatccgcatagttatttctattagcttgaaagtagatttcaaagataaggtctttattcttagaggttttctttaacttctgacctttactaactaccttaaaatcaggaaatttacttgctatctcctgccaagctttttcacataactctctaggtttcaaaattgtaaaagtcctcctaaatagtgctgtatttcttttaaagattactttatcggtaaaaacatgggttattttttgacacgatacaccatatcgccgctattccaaatatacataatgacagatacggggggttgtccgttttcccaaagccagcctgtatatgtagttgtattggcaaaatagccttcagtaattatttcaaattctgagtctacatactcatttataaaatcttgtaaacaaagagactttccataaaagcgaccttcacccaaggttttgttaaatattagtaccttacacaaatccacatcacagttgttaaaacatatttctcctgagaatgctttttcttcaccatctaacaattgatacatttcttcaactgttaatgttaatgttttattatgaattttgattctatttactttactaccataaagactgaaaaggatattactatgtctatcatgtataaactccatattattcctcacaatatgaaatctaaaattgtaattaaatatattataaaaatattatttgattatttaaacgaagtgtattctattacaaccgctttattatattaggtctaaataaaaaatcagatttattcagttctagaacaatgcacttaaataaatattatttcttatcgataaacactgcatcacctctataaagtgaataagagtcatccaaaacatacttatttgacgaatttaatgctggaaactgaattactgcatctccaaccttaaccgcatcagacttaatatgaacttcaaaaggactattagtatcaatcttagctaattcaaataatgattgataacctactgttacccacataccaggaccttcaaattgatcatcgccacgtacggtctctgttggataatatgtatttccattttgtactatagatataaccacattattagtatcattatacatcttactttccggcatataaaggaaagatctaacctgtaatatattattagcatttcttgttgaataattacttgctacacctctagcatcctccaatgccgtattggcataaattgcaaatggagtttgaacatatacgataccttgcaattcatttcttgggaaaattccaccataacgccttttaataaactttttcttagcagtagatatcattttaatatttttcttttctactaaagactgtccataagatgttgctgatgcaatatcttcatttgttatttggtgtttctcaataacttgaggattataagtactaatatcttctgcagatactgccataacagacatagctaaaattgaaaataaaataatttgtttcttaaaattcatagtctcacctacaaaacatatacttttaaaaatcagctaaaaaaatttttagacatctataatctgatcagtggttcagcgtttccaatcattcttcacttcgttcgaattcttggacatccctgacatgggcagtgctaatgcttactgcgtcgtttcacacctagtaagcaaagcaacagcttcgacatgcgctgtcatagggaacatatctacaggttggacttcttttagttcataaccgtagtgtgtcaatatttcaatatctcgtgccatggttgcagggttacaggatacatagacaatgcgttttggctccatgcccgctgcagaggttaatacttcttctttacagcctgctcgaattggatcgaatacgatgacgtctggtcgtacgccggctttatagagttttggcatttcaacagccgcatcagcgacgatgaattcagtattgtcatagccattattttgggcattttcacgagcattaataatggctggttctacgatttctatacctattacatgttttgccttatgagccaaaaacaatgaaatagtacccgtaccacagtacgcatcgataacagtttcatcaccttttaaatccgcataggctaatgcttgatcgtaaagcactgtagtttgttctggattcacttggaagaatgaatgtggtgacaaggtaaaacgtaggtctttaatatggtctgtaatcataccatctccataaagaacatgattagtaggacccaaaatgacattggtacgtttactattcacattatgaacgatggtttccacttgtggtatacgattggttatgtttttaacccattcttcttgatgcggtaaataatcattagcagttacaagaataaccatccatccagattgtccaatacgaccgattacatggcgtaatacacctttgcctgtatgttcatcgtatggctcaacatcaagttctttagcgatgtcataacagatttgggctatacgattatttccatcatcttggattggacaattcgtcccctgtacgatatcgtgagaccccattgcatagaatcccatttgaatgtcgcctttagcaccaccgacaggcatttgcatcttgtttcgatacgcccaaggttcttttggtcctagtgcaggttttacaaggttgggattctgatgtccaatgcgttcaataacgtctttcaccttttgtgtttttagtgaaagctgtccttcataggtaatgtgttgtaattgacatccgccacatataccgtataactcacaagtaggctcaatacgattattagctgatataactacttctaacagcttacctgtagcatatgtctttttcaccatgttgatagatactttcacagtttcaccaggcaaagcaaagggaacaaaaacggtaaaatcgtctacacgtcctacaccttccccactactgccgataccatgaatggttaccaaaacctcatcaccaagtttaacaggcgcatttagaatgacctgttgttttttagaaagttttccacctgtatgttgttgtctacctttagatttatgtttacgagatgtacgacctgtaccgttcattacgcgtctcttttcttccaaattttaatgataccagtcacgatgagtacaaagaataccgcaccaaatttaacgagtaattcttccccttgaatatatggtaaaagaagtggatcttctacgatcatttcaccggcaacccatccaagtagtgcaccgccagcccaaagaatggctgggaatttgttaataatacgagcgaatagtgtagaacaaaatacgatgataggtaccgtaattagcataccaacgataacaagctctaaatgacctttcgcagcacctacaacaccgataacattgtcgatactcatcatggcgtcggccacaataatcgtccaaatggcccccattaaggagtttttagcttcaatatgagcctcttcatcatcgccttttaaaagctgaatggcaatccatataagcacaagtccaccgcctaaatgaacgagaggaatcaaggttaacgcttctaccaagacagtagcaaatattaggcgcattaaaatggcacctaccgtcccccatataacggctttcttttgaagttctggtgctaatttaccggctgccataccgataactacagcattatctccggctaataaaatatctatcaatataatcttgccaatcgtaacccacgtggccgcttctaaaaattccattatacgtacctcaactataattaattctataactatcccttaactataccatattttatgtattttctcatctaaaacaaatgctttaatatctttcataatctactgcaaaaaaatatctctcctcctgtaaaaaagagaagagatattatacattccaattattttttaagttgttttactactaaagatgcgcctactacgaggataacggcagctattttaatatacagcgcatacggttcaactgtatgagcaatcaatgtatcttccacactcatgccagcgccgacccatcctaggataccaccaccaacgtagagaataattgggaaacgctcgatgactttcacaaataatgtactaccatacacgatgataggaaccgtaataagcatacctatagcaaccattgtcatgtggccacctgcagcgcctactacaccgattacattatcgatacccatgataccgtcagcaatgacaatcgtcatgatggcagctcgcaaactatccttggcctcgatattatgctcactgtcatcatcagcaacgagcttgtacccaatccataataaaaggataccacctaccaaacgaagcgctggaattgtatttaaagcctcaacgaagaggaatgccataacgagacgtaaaatgatagcacctgctgtgccccagaaaattgctttcttttgtaaatgagccggtaaatttcgtgcagccatgccaatcacaatggcattatcgccggccaacagaatatcgatgacaatgatttgtaacattgccaacaaaccttgaacagatacaatgtccaattcgtacctcctataacgaaaatatttaatatacttattatactaaagagaatctaccttgtacaatactgtaataggcacatctattcctaatacgaatacccatatatacaactatattctatagtttttaatacacctagccataaaagatagactatgttaaaatatatcatcaatttaggaggtcattatgtatcaaacatattctatactacaaaaattatggttgttcattaaactatttactcctatgtgcatcacccaattttctcttgtagggggcacatttatcgccatcttcttaacaggacaatatagtacaattgatttagctggagttgctacagggtacaatctatggttattattctatatctttgcacaagggaccctaatgggtatcaccccgatcattgcacagctattaggagccaagaaaacagatagtatacctaccatcgtctaccaagggttttatattgcaacaaccctagcacttattatattattaatcggtgttttcggattagtaccattactaaatttccttaatttagaacctgctgctacggctgtttgtatcaattatttgaaagctttcgcacttggcctattccctctgttatgggttaatacattgcgtaacaccgttgattcccacgggttaactcactattctatggccattgtagtaacgagttttgtagtgaatgtattcttaaactactcactgatatttgggcacttcggattgcctgaaattggtggtgtcggtgctggttatggtattgctggagcatgttggacaaactttattttatttagtgcgatggtgctcttccatcctaaattaaagggatatcgtatctataaagattgggtacgccccaaatggcaatacatacgtgagcaattacaaatcggcttgccaatcggttcttccatcttttttgaagccagcattttcagtattgccggcctattgatggtacactttggttccgctgtcgtagcggctcaccaatcggtcattgcctttaccaacgtgttctattgcttaccacttagcattgccatggcttctaccattgctgtaggctatgaagtcggtgctgagcgacataaagaagctattcagtactcctacatttctcgcgtgttagccattgtcattgcgattttgatttgtgctttcacattcactcatatggaaagtatatctgcattatttacaaatgatgaagaggtatataatctaatttatagattccttgggtatggcgttttcttctccgccttcgatgccattggtacaccgttacaaggtattctacggggctacaaggatgtaaaaattgtattctatatttctctcatttcctattggggcgtttgcttccctattgcatacattcttgccaacaacccaaattacggaccatttggtgtatggataggcctattagctagcgtaattgtagcaggcatactattcaccatccgaacatggtatattcaacacaaacaagtacatataaaagcataacgcacaaaagcagcactgtaagtcataatcagcagtgctgcttttctactataaggtattaactatttttgtattacattgtattgccttgtaatacatcttgtttttcaacattcgacatgcggaaaaaattgtataatgtttccgccgtcttatagttcatagaatcgaccttagctaattcatctatactggcttttttcatggcctctaagctattgaaatgagcccataaagccttacgtcgtttaggaccaataccatcaatgtgatcgagtacggattctaagttacgtttgccccgcaatttacgatgataggtaatagcaaatcgatgggcttcatcacgaatttgttgcaataattgcaactctggtgaatgatgactcaaaatgatgctatccgattgcccctctacaaagacctcttctatccgttttgccaaggatatgactggcacatctgtaacacctacggcgcgtatgagcggtatagatgcattgagctgccccttaccaccatcgataataatgaggtctggcataggccaatccgtttcattaccatagcggcgttccatgatttctgccatcgatttaaagtcatctggctttccctgtgtagtctttaatttaaagcgtctatattccttcttagctggcttgccgccttcaaatacaaccatggaggctacggtttcagagccttgtgtatgggaaatatcaaaacactccatacgctctggcaatcttggcaagtcgaggacctccgccaatttcttaacggcaccgccactcttatcgatttggtattgccattggcggcgacgttcttcaaggaatgtttcagcattttcatgagccattttaatcatgtccatcttatagccacgttgaggcacaagaacatcgacctgttggcccttcatgtcactgaaccaatccttaaatagatgttgctcagaactttccataggcaataatagctctttaggaataaaggtagtatccccatagtactgcttaataaaatcagtcataatggtttcttccgagtcaccttcattttgtacgaagtaattttctcggcctaatagacggccacctcgaataaagagtagttgtacacatgccaattgaccatctacagctatccctagtacatctagatcaccacgttgcgttaccatccgctgtttttcttgaattttctcaatgctcgtcaattgatctcgataacgtgctgcatcttcaaatcgaagctcttccgcagcttcttccatcttttccttaatttctttaagcaatgggattggttttccctcaaagagttctataatttcatcgatatatttacaataatccggtactgatatcttatgaaagcatggcgcttcacaatagtgcatatgatattgcaaacaagggcgttctaccttcatcgatttacaggtacgcaatggaaaatactgacgaatcaacttgaggactacatgaacggctgttacatcggtaaagggcccaaaatatttagccccatcacgctcaaggcgacgtgtcatatatacgcgaggatagtcttcttgaacagagattttaacataaggatacgttttatcgtccttaagggaaatattgtatttcggcttatgttctttgataagcgtattttctaatatgagggcttccatttccgtctttgtttgaataatctctacatcaacggcacgcttcatcatcgccgttaccttaggcgcccgattcgcatcattacgcacataggatcgcacgcgattgcgtaaattaatcgctttacccacatagatgatgcggttatattgatcacgccataaataaacccctggtgtggtcggtaaatggctaaccttttctaataactcttcagacggcatatatcctcctttcttcgtcaattctccataccattataaataatacttcattgtcgcaaccatacaaggcagtgccatacaaattatttctttttctttgcagcattcataaatgtattagtctgttctaatacaggacctaagaattttccagtatagctttctttcacctttgcaatctgttccggtgtaccggtagccacgatagtaccacctcgattaccaccttcaggaccaagatcaataatataatcagccgttttgataacatctagattatgctcaattacgataactgtatcgccaccatctaccagtttctgcaatacatctaaaagctttctaatatcttccgcatgaaggcctgttgtaggttcatcaaggatatatagagttttacctgtactgcgacgtgctagttctgtagccaatttaacccgttgtgcttcaccaccagacaatgtagtagccgcttggcctaaacgaatatagccaagaccaacctcttgcaatgttaccattttcttgtagattttagggatagcactaaagaattctactgcatcatctacggtcatatctaacacatcggcaatagatttgcccttatatttaacctctagtgtttcgcggttgtagcgagcccctttgcagacctcacaaggcacgtacacatctggtaagaaatgcatttcaattttgatgataccatccccacgacaagcttcacagcggccaccttttacattgaaactaaaacgcccttgtttatacccgcgcatcttagcctctggcgtttgactatataattcacgaatcgcatcgaatacgcctgtatacgtagcaggattagaacgaggtgtgcgaccgatagggctttggtcaatgttaatgattttatcgatatgctctagacctcgaatctctttatgggcccccaccttatgatacgaacgatatagctgatttgccagccctttatataagatttcatttatcaaagtagacttaccagaaccgctgacacctgtaactactgtaaatagtccaatagggaatttcacattaatattttgtagattattttctttggcacctcgaatttcgatgcagtttttaccaggtttacgtcgttcgtcaggaagagcgataaacttgcggccgctcaaatattgaccggtaatggagtctttcacctgcataacctcatctaccgtccctgctgcaatgacttgaccaccatgctcgcccgcacctggtccaatgtctacaaggtaatctgcagcgcgcatcgtatcctcatcatgttctacaacgagcagtgtattaccaaggtcacgcaacccttttaaggtatcgataagtcgatcattatcccgttggtgtagaccgatggatggctcgtcaagaatatacaacacaccaacaagaccagaaccaatttgcgttgctaaccgaatacgctgtgcttcaccaccggataaggtgcctgcactccgattcatagtaaggtaatcaaggcctacattattgaggaatccaagtcgtgcattaatctccttcaaaatttgagccccaatcacttgttctctgtcagttaactgcaaatgactaaagaaatctaacgcctctttaatcgtcaactgggttacttcattaatattcttatccccaacggtaatcgctaatacctcgggttttaaacgggcgccatgacaggtcgtacatggtttaatggacatgaatttttcaaattcttcgcgcatagaatcggtagatgcttcgctatggcggcgtttcaccatcggcaaaataccttcgtattcagtgaaaaattccttttcttcgccacgcatattttcataggtgaaagccaccttatccgtagtaccgtacatgacctttttctgtaatgcttttggtaattcatcataggtagactctaaagagtaaccatttgctttcaacaagccttctagctgacgcataaaccatgcgttaggattagaacttaacgcctgtacacaaccatcggcaaaactaatagagccatctggaatgacgcgattttcatcaacctccatggtagagccaatccccaaacaagcggggcatgccccaaagggactattgaaagagaacatacggggctcaatttttggcaatgaaatatgacaatcagggcatgcaaagttctgactatacatatgctctgggccatcgacctcttgaacaataacgataccttctgcccatttagaagctgtttccatagagtctgctaaccgggattcaatgccttctttgacaacaagtcggtctactacgatatcgatggaatgctttttatttttctctaatacaatatcctcatccattgtgcgtaccacaccatcaacgcgagcacggacaaaaccctcttttcgaagttgttcaaagacagatttatgttcccctttttttccttgaatcataggtgctaagattaaaatcttagtcccttcagaaaagctcattacatcatctgtcatttgttgaatggtttgttgtgtaatgggtttaccacactctggacaatgagcatgtccaacacgggcaaataatagacgtaaatagtcgtaaatctccgtcaccgtaccaactgtagaacgaggatttcgacttgtagtcttttggtcgatagaaatggctggagataaaccttcaatataatctacatcaggcttatccatttgtcccaaaaattgacgcgcataggccgacagtgattctacataacgccgttggccttctgcgtaaatcgtatcgaatgcaagggacgatttaccagatccacttaaaccagttaagacaataaacttgtctcgcggtagtgaaatatctatatttttaaggttatgctgacgtgcaccttttacaatcaattgatctttcatatatgtacctttttactttttggtgattgtttcttagaattttttcgtggtttttttaacttactgtcaccgacactatgcatatcggaccattgttgacgaagttcgcccaattggtcacgtaatttagcagccttttcaaattccaactgtttagcagccgccttcatttgacggtcaagctcttcaatcttgttatatagttcttctgccgtaatctctgctaccttagtagcatctgcatcttgagcatatggttcgtggccatggtccattccagctgcagaggacttctttttccctttctttggtgaaagccctttgccatcggtgaccatatcttcttcaattttagtgagctcaataagctctttcacatctttagatacagattttggcgtaatatgatgttcaatattatatgcctcttgtactgcacgacgacgatctgtttcgtccatagcgcgttgcatagaaccggttacacggtcagcatacataataacatgaccattcacattacgcgctgcacgaccgatagtttgaatcatagctgtatcagagcgtagaaaaccttccttatcggcatctaaaatagccaccaaggaaacctctggcatatcgaggccttcgcggagcaagttgataccgactaatacatcgaatacaccggcccgcaaatcgcgaatgatttcagcccgctcgatggtaacgatatccgagtgaaggtaacgaacacgaacacccatttccttcaagaattccgttaaatcttcagccatcttcttcgtcaatgtcgtaacgagaacccgttcattcttagcggcgagcttatgaatctcaccgagtaaatcatccatttgccccttaataggacgaatttcaatggatggatcgagtagccctgtaggacgaatgatttgctctgccacattcgtttctacttccatttcatacggtcctggcgttgctgatacatacacgatttgattgatccgttctacaaactcatcgaatttcagtggtcgattgtcgagtgctgatggcaaacggaagccatattcgataagagattctttacgcgctctatccccattgtacatagcacgaacctgtggaatggttacatgagattcatctaccatgatgaggaaatcatctgggaagtagtctatcaatgtatatggtgcctctccagccttacgttcggacatatggcgggaatagttttcgatgcctgaacagtagcccatttcttgcatcatttctatatcataacgggtgcgctgttcaagacgttgcgcctcgagcagacgatcttctgctttcagttttgccaactgctcatcaagttctgcctcaatgcgctctaccgcaattttcattttttcttttgttgtaacatagtgagatgcaggatagaccgcaacatgtttgcgctctgcaatgacttctcccgttaatgcatccacctcaacaagacggtcgatttcatcgtcgaatagttccacccgaattgctctttcactataggcagcagggaaaatttctatggtgtccccttgtacgcggaatgtaccgcgaataaaattcatatcattacgcgtatattggatatctacgagtttagacagaatttcatcacgagatttcgtctgacctaatcgcaaggacaatacgagatcagaatagtcctccggatcacctaagccataaatacagctaacagaagcgacgatgataacgtctcggcgctcaaataaactcatagtagcactatggcgcaatttatcgatttcatcattaatagatgcatccttctcgatgtacgtatcactagaagggatatacgcttctggttgataaaaatcgtagtaagatacaaagtattctaccgcattattagggaagaaacttttaaactcgctgcaaagttgagcagccaatgttttattatgggcgataatcaaggtcggtttctgaaccgcctcgatgacctttgccatggtaaaggtttttcctgtaccagtcgcacctaataggacttgagcccattcgccacgctcaatcccgtctgtaagagattgaatggctgtaggttggtccccagtaggcgtaaagggcgcctccactttaaatggttggcccccttcatagttatagctattatgtttcattactgttcatcctgatgtttacggatagccttgagttcttcctctgacaaacgacgacctgcattttcagcttggttcaatgtatcctcaccttctaacacttcgatgagcatagcaatggaaaagcgatctaatgtaggcgttgtcttttgaatttcatcggccatcatccaatctgattcagtatagttattaatacgatctgtaatttcttcccagtttgaaagtagtaatctcgtaataggacgatataattcaataccgaaatactcgattaagctaacgattttttccatgttttctaggcttacattacattcattttttttattttcagattctacatattcaagtaagaattcccggttatatttatttgtcaccttgaatcattcctttattaaatagtgcattggcaaattcttttgcattaaatggacgtaaatcatccatgccttcaccaacgccaatccaacgtacaggtacgcctagttcttctttaatagaaataactacgccacctttcgcagtaccatctaatttagtaactacaataccactaacaggtacggcttgaccaaataatttagcttggcttaccgcattttgacctgtagtgccatcgagaacgagcaatgtttgatgtggagcaccctctacatgattgttcgctacgcggcccatttttttaagttcttccataagatttacttttgtatgaagacgaccagccgtatcgacaattaccatgtctgcattacgagcctttgcggcttccatcgcatcatatacaacggcagcagggtccgcaccttccttatgttttacgataggtacgcctacgcggtcagcccagatggataattggtccgccgccgccgcacggaatgtatctccagcagcgatgataacctttttaccttctttagtatagtagtttgctaatttagcaatagttgtagtcttacccacaccattaacaccaacaaccaggataacctctgggtggtgaagtgtgatttcatcctcttggtcaactaacatttctgtgatgcggtcttccataaatggcattacatcaccagtattgttaataataccttctgtaacaccacggcggatttccttcatcaaatactctgtagtcttaggacctaaatcgctagtgagcatgactgcttctaaatcatcaagaaaatcatcatcgatttctgcataaccaatgattactgtttctacattttttacaaaggacttacgagttttttctaagccctctttaattttattaaagaatccaaatgccattatgctagatcctccttcacatcttcaaatgaaaccgttaataatcgagatacaccgcgctccaccatggtcaccccttgtaatacttcggcagcttccatcgttttcttacgatgtgatacgacgataaactgagtttccttatttacgcgattcaaataagaactaaatcgctctacatttgcttcatccaaagcagcatcaacttcgtcaagcacacagaatggagccggacgatagtcgaggaacgagaataataaagcaataactgtgagtgctcgttccccaccagatagtaatgtcaattgttgacgctttttccctggtggttgaatatagaaatcgatacctccagtcaagatattttctggatcggtaagtacgatttgagccgtaccaccgccaaataattgactgaatacgtgttggaactgcttgcctaccacatctaatacatcgtatagttgcgtgctcatggccttgtccatttcagcaataaccgcttgtaattgttcttttgccgtatcgagatctgctaattgattcgataagaaatcataccgagttttcgtctcttcatactcttctacagcattaggatttacagatccaagttctgcaatttccgccattaaacgagcttgttccattttccaatcattcacagagccggcaatatttatatgctgtgcatcttccaatgaatagcctaattcattcaaatcctctacagcacgatcacagtccatgcgataacgcgtcaatttaccttctgcttcaactagacgattttgaaccaccttataccgctggttgagttggtcttgttcagctaaaattgattcaatctcctcccgtgcaccagcagtcgattgatacgcttcatcacgtaaagcgcgaaatttttcaacctctccacgaatcgcttcaagagactcattagcaactcgaatttgttcaggaatcacaacattcaaacgctcttcactagaatgtaataactccatgagaggttctaagcgagatgctatggtttccaaattttgctttcgttgctcttgttgtaccttacgttcttctatggtgctttctaaacgttcacaaaacaatctagaggctgtaaaagcttcatatgcctcttgctgtgccttttgcagcgtacttaatcgttccataatcgccgattgatcaccttgttgttcaggtgaattatgtaacgctgacaattccgattcagattgtgaaagcacatgttttgtttgtcccatgtccacgtcaatttgaacgatacgttcctgttcatcatgaagcacacgctttttacgttctaattgattttcaatgttctgaatcttcgcttgactggccgaaaagaaaagattggtatgttgatattgttcatccaacacacttcgctcacgttgcgcccgttcaatacgattttcttcatccttaatttgttgttccagtttagccgtacgctcttccacagaagctaattcggcctctaaacgagccgcttcttcacgacgacttaacaaggaactgcgttttttcttcgttgcaccaccagttaaggaaccacctggttggaattgttcccccgtcaatgtaacgatgcgtaactgctgattatatttcttttgtaacgcaatagcccgttccattgtttctacaactaatgtacggcccaacaagtattgaaagatatgattataggcagcatcgaattcaatacagtcaacagctgtcccaatgacaccatcttccgacaatgcaggagtatcataaggtcgcccttttacagaatccatcggtaaaaaggtaacgcgccccccttgtattgatttaaggaattgaacgccttctgatgcggctttagctgtcgttgtcacaacatggttaacactaccacctaatgcgatttcgatagcaacagtaaagcggttatctacggtaaataaatcacctaccgcccctttaatcgcttcacgccatgggcccttaccgttaaggatgtttttagttccttctaagtaaccttcatgttgttctgcccattgtgctaataattctaatcgcccctgtgccttttgcacatcgctactcatgcgatttaatgcttttcgagcttctcgcaatcgttctgatgcagaccgttcttcatcaactaaggacttccgtttattagataactcattaaattgagtttctaaagattcatgttcagatttcgctgccgataaattggattgaacctctttaatttccgtttctaaagtttctacttgaacagcggactcagatttacgagattctaaatttcgcaatgtagccttcgctgtttcaatactagcaactaaatctaattgacgctgttgataggcctgtctgtcgctttctaaggacttccatgatgattgctccgcatctaattgagcaatggccttattataattttcctctaaaactacgaattgagtgcgttcagattctaattgagccgtttcatcctcaataaggcgatctaaaatgagcaattgctgctcttcaccctttttagacgcttctgcttcgctaatacgcagagaagtatcttctacttcgcgcttagttgtacgcaactgttcttctagtagtgttacagtaccattgatgcgttcttcttcccgttgtttttcgctaaactgtgcttcccaagattttaattgttcttgatcctttgcattttcagcttgtaatgtatgacgtcgtgcatcgagggtagataattgcgtttgtaattcaatttcctcatccttcaatgcaatattgtcattttctgcacgggttaatagtcgatcagccgtcttgtaattgtgaaaaccgataacaccatcatattcgcgtttactacggcttaatgccatatatttttttgtcgtttccgctttttctgccagaggtcctaattgttcctcaatggtcgccataatatcgcgaacgcgttccatattccggtctgtgctcgcaatacgacgcaatgcatcctctttattaattttaaaacgagaaatgcctgcaacgtcctcaaatataaggcgacgttcttctggtttactattaagaatagcatcgatacgattttgcccaatgatagccatcgaatctttgccaaggcctgtatcagctaataacaagtgaatatcctttagacggcaggtccgtttattgatgaggaactcactttcacctgtccgatagatacgacgcgtaatggctacctcttgcatgtccacatcgagttgaccatctgcattatcaaatacaagggtaacctcggcagcactcatcggttttcgtttttctgtgccagagaaaatgatatcctctgcacgttggccccgtaaattacgcacattggattcccctagaacccatttcatagcatccgtaatattacttttaccactcccgttaggaccaataacggcagtcatccctggggagaattttacaactgttttatcagcaaaggatttaaatccttttaattctagccgcagtaattgcatgactgcctcctttcttagtataatcccattaaatcatatctttaattataccacatataccatgccatctatactgcattgtactgtatcaatatcattattttctcgccatgtgaaagatatatattcatatgctcgttcgaaatatgtaacattgcgtttttttaatccccttaccttagacgtaagacatcgtggataggatatcgtaatggtacgaattggatttctaaaatattctgtatgctcatcgatacaatatgctatgcgctgcttccactgctcattagtcactagttctcccatggcaggctcataaggacctgccaatagactagtacctgtatcgagttcttcagtgctttgcaatccagtccgaataacagtaatatgatgcgattcaaaccaagtctttaaaaacgcacaatactgtaatgctaattccaatgataatggctcatatatacctgacttatattgttccgccaattccgtatgatctatgacgagaacgggataaatacgtacaaaatcaggctgcaatgcaattatttcaacagctgtttgtattatcgtttcccatgaatcgcctaaaagccccggcaacagttgtagtcctacggtaaatccaaactttcgtaattgtttaacagccaattttacatcatcagaggtatgaccgcgtttagctaaggatagtacggtatcatccatagattgtacgccgagttctatggtcttcataccaaatgaacgcagtaattctaattgtacatcacttacggcatcaggccttgtagaacaacgaataccatctataatacccgcttgtagcgcttcattagcaggtgctaataattgtttttgtaattcttgatcaatagcggaaaaggagcctccataaaaacaaacctcccaatatttatcctctctagactcgcctacataatctctaatggtcgatgtaatatatgctggagtcaaataccctatgcctgatatttctgtaatacgagactgattacaaaatgtacacacatgaggacagcccacatgagggataaaaaatggaatcatgccatatttcataaatatacctcctccctattcttatttacgattctaattacatacatttcgattttaatgttctcatattaatagttcctatataaaaagcgccttgcggcgctttttatatagcagccattaaccgttctaatgtcaattgtgctgcatgttgttctgctatttttttacttttaccagtacctgcctcataggtaatcccatcgatggatacctccatcataaaagtcttagcatgatcaggaccagactcactgataagactatacactatatgtttatcaccatcacgttgtacaaattcttgtaacagtgtcttataatctttaccacgcttaccttctaatgcttgcttaagattaggagctaagtgatgaagaacaaagtccattactgttttatagtcagtcgttatatataacgcaccaatcaatgattcaaatgtatcagctaatatggattttctatcactaccaccagaggacttttccccatggcccagtaataaataatcacctaaatgcaatatacgactaacggtagctaatgaatcttcacaaactgtagccgccttaatcttagtcaaattaccttcagacatatcgggatatgttgtaaataaatattcaccaataattaaatccaatacagcatcaccaagaaactctaagcgttggttatgatgaatatgcttagatttatgttcattcgcataagatgtatgagtaaaagcacaatctaaaatcgagatatcaatattcggtatatgtaaacgactaacaagctcatgaagagaatcttcacgagcttgtgtcattatagtattcttatgcgatacgtgacgccccattagtcttcataacggcgaacacaaagtgtaccgttatgaccaccaaagccaaaggagttggaaagagctgctgtaacatgtaaatcacgagcaccttcacgtacataatcaaggtctaaaccttcatctggattatcacagttaattgttggatgaaccttacctgtttcgattgccattgccattacaatagtttcaatcgcaccagcagcacccaacaagtgaccggtcatagattttgtagagttaacagcgatatcttttgcatggtcgccgaacaattctttaatagccaatgtttcgtttttatcattcaagcctgtagatgtaccgtgagcattgatgtagttaatttctttagggtcaatacctgcatctttaattgctaattccatacatttacgagcttgtacaccaccaggagctggagctgtaatatgatatgcatcgccattagtgccatagcctactacttctgcgtagatatgagcaccacgagctttagcgtgttctaattcttcaagtacaacgatacctgcaccttcacccattacgaaaccgtcacgatccttatcaaatggacgagatgcttttgtaggctcatcattgcgtgtagacatagctttcatagccgcgaaaccagctacagcagcaggagaaacagcagcttcagtaccacctgcaaacatgatgtctgcatcaccacgttgaataatgcggaatgcatcaccaattgcattagtaccagaagtacaagctgtcacgtctgtaataacaggacctttcaaacctaggcgaatggatacacgtgcagaagacatatttgcaatcatcataggaactgcaaatgggctaacacgaccaggacctttttcaaataatgttgtatacacatcatggatagagtcaataccgccaataccagtaccaactactgtaccacaacggtccaaatcttcttcatcaagtgctaattttgcatcatcagctgccaaaacagctgcaccaattgcaaattcaacggaacggtccatacggcgagcttcttttttatctacgccatattgagtaatatcaaaatcttttacttcacctgcaatgcgtgttgcatagtcagatgcatcaaagcgtgtaattgggccaataccagacttaccctctaacaacgcattgtagaaattctctttaccgatacctaccggagtaatcgctcctaagccagtaattactacacgtttttccaattattccacctcttatagctatatagcccctttaattaatcgatttctgctacttgttgttttaactgtgcaaaaatatctttaactggcataatcttatcgacttttcgcatattattgccagagaatactaaccccgtttccacatcaccttgttgcgctctagataaagcacggataatacagaatttatgggaacaatgttttaaacaattgtcacatactgttggtggcgctacagtgccatcaagaacagattcagcaaatttatttttaatagcttggcctggtaaacctactggactttgaatcaatacaatatcctcaggatttgtagcacgcacatacatttttttcaattcatcagatgcattacattcatcagaagcagcaaagcgactgcccatttgaacaccattagcacccaatttaaacatatccacgatatctttaccatctaaaacaccaccagctgcaataactggaatatttttaacggctgctacaacttctggtacgatttcacgagcagaacgatccgttcccaagtgaccaccagcttcgctaccttctacgataactgcagcggcacctaaaccttcagaaatgcgcgctaattttgcagaagaaacaataggtacgattggagtaccagactctttacccattgcgaacatatctcttgaaaaaccggcacctgccactacaagatcaatgccctcttcgatggcagtttttacaaggcccgcaaattgcgttgctgctaccatcgcatttataccaataatacccgtaggtgataattttctagctaattgtatttcatatcttaattcatcaaaaggcaatccagatgctgcaataaggccaataccaccttcatttgcaacggctgctgccaaccgagctgtagacaatctaatcgccataccaccttgaataataggtactttggccactagattcccaatgcgaagttcagggagcttcactatcaattcctcctgtaaacaataccgattaggggagccactcggccccccgcacggctgaattgtcagctatacagcttatttagcagaatcaatatattctactgtatccttaacggttttgattttttctgcaacgtcgtcagggatttcaacattgaattcttcttcaaatgccatgatcaattcaacgatatccaaggagtcagcgcctaagtcgtcgatgaatgtagaatcaatggtaacttcagcttcatcaacgcctaattgttccacaacgattgctttaactttatcgaaagtgctcattagtggttcacctcctttcaaatgagatttatatatagtctaattttgtaactacattaccatgccgccatctacattgatgacttgacctgtaatatagctagcaaaatcactagcaaggaatgttgttacggcagccacttcttcagctttagccatacggcccaacggaatttgtgttaccatagcttctttcaccttttcaggcaatacatctgtcatatcagtattgataaagccaggtgcgattgcattaactgtgataccacggctagctaactcttttgcacaagatttagtaaaaccaattacaccagctttagaagccgcatagttagcttgaccagcattacccatcaaaccaacaacagaagtcatgttaataatatgaccagcacgttgtttcatcataattttggatactgcttttgttaccaaatatacacctttaaggttgatatcgataacggcatcaaagtcttcatctttcatacgcataagcaaaccatcacgagtgatacctgcattatttactaaaatatcgatgtgaccaaatgttttatgcgtttcttcaaccattgctgctacttcttcagcatttgcaacattggctttaattttaatcgctttgcgacccaatgctaagatagcgtctactgtttcttgagcagcagcttcactgccactatagttaacagcaacatcagcaccagattgtgcaagttgaatagcaacggcgcgaccgataccacgagaggcgccagttacgagagctactttaccctctaagtgcattttatcgaaccccctttaaaaattcaagcgttttctctaaggatggaatgtcttctacattagctaattccatttctttattaatctttttagtgaaacctgttaatactttgccaggaccaacttctacaaagcgagttacaccgaagttaaccatttctgcaacacaatcttcccacaatacaggattagctgcttgtgttactaaagattctttaatgtcactagcatttgtcaaaattttgccggttacattagctactactggaatcttagcatcgttaacttggatcttatctaattcttcttttaaacgaagcgctgcaggttccataagacgactatggaatggagcacttacaggaagcattactgcacgttttgcaccggcttctttcattttttcagctgctgtttctacggcagctgtttcaccagcgattacgatttgaccagggcagttaaagtttacagcttgtacagaaccaactgtatcattaacttgttggcaaatttcaacaacttgttctcttggcaatgctagaatagctgccatagcacccttgcccaatggtacagcttcttgcatatattcaccacgtttatgaactacatacacagcatccttaaaatcaagaacaccggcagcgactaacgcactatattcacctaagctatgaccacctacgatatctggtgtaaagccttgttctttcaacacttcatagcaagctacggaagcagttaaaatagctggttgtgtattagcagtcttaaccaattctgtatcagggccttcgaagcataatttagaaatagaatagcccaatgcttcatcagcttcttcaaaacgttgtttaacaatagggtatgcattatacaaatcttgtaacatgcctactttttgggatccttgacctggaaatacaaatgcagttttcataggatggcctccttatttgccaaaagtttgtagatttttaatcactgtttcagcttctgtcataatgtctgtaatgatttctttacaaggtttcacatcgtgtagcatacctgcgatttgaccaatcataacggaaccttcttttacatcaccttcaatagcagctttacgaagtgtacctgcgccaagattttctaattcttccttggaaccaccactaaattcaagatttttatatttatgtgctaattgattctcgataattcgaactggatgacctgttgtaagaccagtcataacagtagaacgatcttttgctttcaatacagcgtttttatagttttcatgagcaatacattcttcagataggacaaaacgtgtacccatttgaactgcatgagcacctagtgcaaacgcagctgctacgccacggccatctgcaataccaccagcagcaataactggaacatcgacagcatctacaacttgtggtaacaatgccattgttgtaatatccccaacatggccacctgattcagtaccttctgcaataatcgcatcaataccaccacgaagtaaacgtttcgctaaaagaacggatgcaactacaggaataacctttgtgccaatttctttcaaagctgggatatatacaccaggattacccgcaccagttgtaataacaggaactcgttcttcaacaacgacttccataacttcttttacaaaaggagacatcaacataatattacaaccaaatggtttattagtacgttctttaactttgtgaatttcgttgcggaaaatatcaggaggcatatgtcctgcaccaattatgccaagaccacctgcttcagatactgcagacgcaagttcagccgttcctaaccaagccataccaccttgaaagataggatactcaatctgtaacaaatcacaaatatcagtcttaatcatcttgatgcttcctccttaataccatttcaagacgaggctagcccaggtaaggccagcaccaaatcctgcaagtgctacattatcaccgcgttttaagcaaccttctcggtttgcttcatccaacgcaatggccactgatgcagcagatgtattaccatacttatgtaaatttacaaacaccttttcttttggcatatgtaaacgcttagcggctgaatcaataatacgaatattagcttgatgtgggataaaataatctaactcatctaaattcatattagctcgttctagagatttcaacgctgtttttcccattgttttaacagcaaatttatatacttctggaccatccatatgaatgaaagtcaagccttcttctatacgttggtcattagctaaaacagctgtaccaccagctggtatacacaatgcagaaccgccagtaccatcagcgcctaagtcgacccctttgataccataaccttctggaacctcagaaactacggcagcacctgcaccatcaccaaatagaatacaagttccgcgatctttccagttaacgcgacgagacaaaatttctgcgcctacaacgagaacatttttaaataatccagaagcgatatagctttgagcagttatcaacccatacacaaatccggagcatgcagcttgtaaatcataagctgctgcatttttcgcaccaagatttgcttgcaacatacatgcggcagaaggaatcaccatatctggtgtcaatgtagcaaagataatcatatcgatatcttctacatcgagcttagccatttgaagtgctttttttgcagcttcagttgccatataggatgtattcataccttctggtgcaatgcgtctttcttcaatgcctgtacgttctctgatccattggtcacttgtatcgaccattttctctaaatcaaagttagtcaccacattatcaggaaggaagctacctgtaccaataataccgacaggtttattcatcatactcatattttacggctccttcaatttccattgtttctcgaatatgttcaattattttgcgttctactaaatcggctgcaatggtaatagcagtcttaatttctttagcctttgaactgccatgagcaatcataaacacaccatttacaccaagtaatggagcaccaccattttcagtgtggtccaccttcttggccattggtttcaacgctggtttgataagcaatgccccaattttagctaatattccgccattcatgatgctgtctttaatgagctgtgtcaaaccagttacaagaccttctgcaaatttaagaattacattgcctacaaaaccatcgcaaacgacaacgtctacggttcctttcggaatatcgcggccttctacatttcctttaaaattgattgttttcatattttccaagataggatatgtagcaagcacaacttcattacctttagttgcttcttcaccaatatttaaaaggcctaccgtaggattttctttgccaagtaaaagtttcgcatactcagcccccatcaatgcaccttgtacaagatgttttggtttactatttgaattcgcaccggaatccaacataacggttataccgtttacagtcggcattggcgtagcaataacaggtctatcaatgcccttgatacgacctagtccgaacaatgcggctgctacagcagcacctgtactacctggtgcaataacagcttcacattctttacttctaaccaaagatgtagccaccacaacagatgcatcctttttcttgcgcaatgcttggccaggatgctcatccattccgattacttgactcgcatgatacacagaaatgcgaggattatttgtttcattattgtcttctaaaattttgaatatttgagttttatcgcctacgagaacaacatcaatatgttccgtttctcgcactgcttccaaggcgcctaagacgatttccaagggagcaaaatcaccacccatggcgtcaattgcaattttcatatactacacccgattctccacagactccatgataaatttagctctaaatacttcttttattttatctctaattataacccaaataaagtatttatctccacgacgacgaacaatttctgctttcgccaccaaattagtaccagactctactggatttttatatttaatattccccacctctgcagagcaaagggttgaacccataactagcttggccaaggaatttgcttgagcatacaaatactgtggatcaatataaccaaaacgatcttccatgtctggcgtcgtatgtaacatggataaagcttgttttccttctgttacatcgatgagttcgcctacaatttcatgctgtattggttccggttgctcatcctgagcatgttcagtagccatcgccttaatacgctcacgcaattcaggaattcccaattctaatcgatcgagtcgaattgtaggtacactgacaccaaagtgcgatgccaactcttcatcagtaagaaaaggcgtaatattcagtttttctgttaactgtttctgtctttcttgcttcttcaacctactcatgggaccaccttttatgacctagtattaatattacatcttaagtatatataataattcccatattggcaaggtttttcgcatatatagtgatatattttatggtaatatactaaatattgtcgttattttaaaattaattaatactttataggagatattaatataaagcatacattaatcaacaactatccatttttgggcagtaaaaaacacctacacaaatgtgtaggtgttttacacgctcaattaggcttttgcaactacttgttcacctttatagtgaccacatgtagggcaaacacgatgaggcatcataggttcgtggcattgtggacatgctacataaccaggagcttctaatttccagtttgcacgacgacgatcgcgacggcatttggataatctacgcttaggtactgccattatctgcacctccttagtacaatcattaggatagtctatcatctttctcatcaagcaaagcacgtaactctgcgaatcgaggatccaccacaaaggattcacaagaacaaggtgaaacattcaaatttgctccgcaatgaacgcacaatcctttgcaatcatcctgacataacacttgagagggctcattgatgattaatgtatcccgaatcagttcggttaagtcaatttcctctccgttaaaaggaatcacatcttcatcggcatctcgagaatcactaaagatttcctcgaaggaatcgttacgctcatgttccgtagtcgttaaacaacgagaacattcgtaatcacctttagaattaatcgaaccttgaacgatgtagttttgaccatcaaaccaaaactcaccactaatagttatatcatgacggctccaaggaaaagcaactacgtcactaccaagttcttcactcggcatcgtatagctataaggaaatttctttcctatatgttcttttgcttgctctacttgcagtttcataatcttacctcgacttataatattataaacatgacagtgtgctttgtcaaataaaaaaggctatctcaatattgcttaagatagcctttctaatgtatcaattacattttttcgaattgatctttgccaacgccacagatagggcaaacataatcagctggttgatcttcgaatttaacgccttctacagcttcgtcataaacccaaccgcatactacgcatacgtatttttccatgtctatttcctccttcacttgagattatattaatgtgttcatatcgttaagatactttatctgtaatatagtatagcaaagatatcgaaacttttcaatactcattttccatttttctattaaattttcaatatcctctgaaagctgactattattactttcatacgtaattttataatgaaatctattatcaattagatttttatgatatactatttactagaaatatatagtggtatactaaatattcgccacataagtagattttattatcttatatataactatattataggaggattcatgagaacaaaactgactgaattactaaatatcgaataccctatcatccaaggtgctatggcatgggtttctgaggctacattagttgcagctgtagctaacgctggcgctacaggtgttatcgccttaggcggtcgcgatgcagaatggactcgcaatgagattcgcgcatgcaaagaactaacagataaaccttttggtgtaaatttaatgcttatggccccaaataaagatgaattagtagatgttatcatcgcagaaaaacctgcatttgtaacacttggcgctggcaaccctaccccatatattaagccattccaagaagcgggtatcaaggtcattcctgttgtaccttccttgaaattagcaaaacgcattcaagatgctggtgccgatgctatcgtcgtagaaggtatggaggctggtggtcacatcggttctcaaacgacaatgtctttgatggaaaacattctaccagaaatcactattcctgttgttgtggctggttccatcgttgatggtcgtggtttggcagcagctttattgatgggtgctgaaggtgtacaaatgggctctcgtttcttacttgccgaagaatgtaaagctcatcaaaatatgaaagaagcaattatcaaagccacagatactgactccgttgtaacaggtcttctctccggtcatggtggtgtacgtagcttgcgcagtgattttacagaccgttatattgcagcagaaactgatggcgttacaacaaaagaagaacgcagcaaaatgtcccaaggtacaaataaattagctgctatcgatggcgacgttgtcaatggtgctgtacaagtaggccaagcgcttaataggcttaatgaaattgagccagctcaaactattgtacactctgttattaatgaagctattatggcaatccgtaaagcacaacgctttatcgaagtaatttaataggaggtcctatgttaccttatcatggaaagtatccaaaattagatccaaaatcttgtgttatgcctggtgctgaactagccggcgatgtagagttgaaagaatttgcctccatctggcaaaactgtgcacttcgtggcgatgttaataaaattgtagtaggtcgttattccaacgtacaagataactctgtgcttcacgtcgatgatgatgaggcttgtatacttggcgactatgtaactataggtcatggcgccattgttcatgcgtctaccatcgaggataatgtactcgttggcatgggggctatcgtactaagtggttgtcatatcggtactggctctatcattgcagccggtgcagtggtaaaagaaaacactacaattcctccctactctttagtcgttggtattcctgcacgcatcgtacgtactgatgaatcccaagttgaaagaattcacaatcaagcattaaaatataaacacctttggactgtagaatatggtatgctaccagattgtggtggcgaagaatacgacaaaagcgccaaaattgtataactacaatgtaaaaaataaggttttctataaataaagccttcacacataaaatagcgactagttgatcatatggtatcagctagtcgctatttctttatcatcagaacatcgtccgatatggtatatagtttgttttataattggaatcttgcttttacaatctgctgagttatcaatgcggagcccatagctagcgccattggaaagcacatttccacggaaaatcgtgaaagttctaacataaacacacaggatgtaagcggcatcttttgtgccaatcctaagaaaattacggcccctataaatgcagcaaagccaaggtgtacagggctgaccataatactccacaaggctgcaaaggctaatgccaatgtactacctagcatcatggatggcgtaattcgaccaccataagcaccagccattaaggcaagtaacacagcaatccatttagtagctaataaacctaatgcataatcccatcctactaaatctgtaaaggtcaactgattaccagctttaccattaccgaggatctctggaaaatacatggccatcaccccaataacagcaaatgataaaagagctatgacaatcattttagggctttttctatcaaacttaggtaataaagattgtgttttatcaaataaaacaacgccaatagcaatgacagcgccaaggacgatagcaaattcttgatagctaccatataagggtggttgtggcatcgtatactgaacaagatctcctatccctgcctgacgaacgaccaatgtagctagtccacacgataaaagggctgcactcatggctcgaacattccatgtgataagtaatgtctctagcgtaaaaatagcagctgataaaggagaattatatacggcagctaagcctgcaccagcagcacaagcaataataagcgacttgtcctcagggcgtatatcaacatagcgcaataatccagacatgataccagcactagcttcacgaggtgctacttctcgaccaagtggagaacccatgccgaccgtgataatttgcaatgtagcatgaataaatgtggtcaacggaggcatttcttttgtagaatcttggacagctttttttatatctaccagtggatctccataacgatggataagaacccaacctacaccgccaacaagaccacaggccagtaaggctaacaatcgatgttcaggcgatacacgggctacggcttgtccaaatgataaaccttctgatgtagaataggcatacataaaatgctggatataatgtaacaaatgggtataaaaagaaccgattaagcccgccaccaggccaacgattattattaaaccaagtaaacgtttatctaacatactctctatatcactccatagccagtattacttcaccctgtttcaacgaagattgtacatcaataattcgttgattagaagagcctctaaatcgtaaggatggatcttttaactcatctacaaatcgaccatccacgaggatatcaatttgttccactaagctacggcgagatggatcagatataatatcatcccatacatagccagagtaagcccagataggtttctcaggagctgcttcacgcaccgctttcactatagctagcataccatctacattttgaaatggttcaccgcctaacaaggtaaggccagcacaattaggatcttttacataagacacaaccagctgtgtttcgttatcagtccattcttgaccagcattaaaatcttgatattcttcattaaaacaattataacagcaatgggtgcaaccagttacaaatatagatgtgcgtatgccttccccattggcgatatcatattgtcgaatctgtccatatctcataataacccccatatttgcctatgatcaactttgaccaaattaaacatatagatatatttcaatttatcatgtatatagtaaaagctgtgccgatggcacagcttttaacatgtttacgattaataaaattaaatatgcattacacgatctttaatttcttttgtgcgaccttcgttccagaagttttcaccaaggtatccacacgtacggcggataactgttaatttatcgcggtttgtattatgacaacgagggcattcccattgattgtcatcattaaccttgatttcaccatcaaatccgcattcatgacaatagtcagatttcgtattaaactctgcataggaaatattgtcgtaaatatatttaatcatcgtcaatactgcaggaatattattggtcatattcggaatttccgcataggaaatgcaaccgccagtcgatttcttttggaattcagattcaaaggcaaatttatcaaatacgttaatttcttcacgaacgcttacatgataactattcgtatagtaacctttgtccgtcacatcttctataataccaaagcgtgctcggtccaaagaagagaagcgatttgttaagctttcagcaggcgtaccataaaggccaaagcctaagttatgtttttcacgccattcattaatagcttggttcaaacgatccataattttcatggcaaaaacacgaccatgttcacctgtattagattcgccagtaatcaagcgacatgcttcataaatgccaatataaccaagggaaatcgtcgcatagccaccagtcaaaaatggagcgattttttcaccttttttaagtcgcgcaatagcaccatgttgccagtgaattggggatacatcacttactacatctttcaatagattgtaacgtaacatcaatgctttttcagctaactcaaggcgtttatccaagatttcaaaatacttttcttcactaccgcgtgctaaaataccaatttgtggcaaattcaaacttactacgcccatgttgaaacggccatcaaatttataattgccttctgcatccttccaaggagataagaaggaacgacatcccatagggctgaatacattgccttcgtaattttccttcatcttctttgcagaaatataatcaggatacatgcgtttagccgtacattgagcagctaattctgttaaataataatatgggctatccggatgaacattgtgttcgtctaatacataaatcaatttagggaatgctggtgtaatgtatacatcggcttcattttttacacccttaatacgttgacgtaaaatttcttccgtaattaatgccgcttccttagcgtattcataatccggttggaaatacataaacaatgtaacgaatggggattggccatttgtagtcatcaatgtattgatttggtattgaatggtttgaatgccgtcctttacctctttacgcgtgcgtttccaagcaatttcacgagccttttccatatttggttccatgccgtaaatctcaacttgttcttcaattacattattgaggattttttcataagatttacgtacgaatggtgccaaaatacggtcaataccattaatactttgaccaccatattgaccagatgctacttgtgcaatgatttgagttgttacagtacatgctacttggaatgattttggcgtgtcaatgcgcttaccgttaataactgtaccatttgtcaacatatcttctaagttgattaagcaacagttaaacatcggttggatgatatagtccatatcgtggaaatggatagcaccgctatcatgtgcttctagtatatctgtaggaatcaacttacgacgcgcaatatccttggacacttcaccagcaattaaatcgcgttgtgtagatacaatggcagcatctttattagaattttcatcaagaacactaacattactacgatccaacaaaccgatgacatcttcgtcagtcgtgttttggcgacgtttgaaagcttgtaccgctttataaccttcataagcacgagctgttgcaggattatgatactcaatcaacttatagtatacttgatcttctattgcatagattgtcatatccttttgaagttttatagcatatgcttcaatttcgtcagcaatgcgttcagctaagccagattcatataaccccgtactactatgttctgccttttcaatagctactgcaattttatgtttatcgaaaggtaccttagtaccatcccgtttaatgacctgcaacatctcggaacctccccgtttcccatactccgaattaattaatgtcattacatataaaaagtatggaaaaaaccatactcaatctatattatttactacgaaaaatacaaaattcaatagattatttcgtatttctaaccgctttcatagtatactatatatagtgttttattgcaataaaaaatacaatatcatgtaaaaaagagtctttttgctatacttaaacggcataacaaaaaaactctttttttataaagcgattgaaagaagtcgagtccagaaattaggccgttttcctgcccaatgatccggtaccgtaggataaaatactctatccgctaataaatcgcgttcatttaatcggacgtcactaagtaaatctttcttatattcaacatctagtttagaaattacatctacatagctaccatattgattgttcatcacatcataaccagtaccaaagaagtgtattagaccattcgtatataattcaatagctttcgtataatgctcagaatgatgtgtaaaagacataatattacattcaaataaaatgcccttatcaacccattccaatagttgttcaggtttattaaagaaaaggtcattacgttccacttcacttatgataggcgtaatacctaagtcacataaagtctgtaaccacgcatctacatgatataacttacaatcttgtggaatagtaactaacataaaatggctattacctaatacaagtgattctttatgattgcgtatatagtcaatcataccatcacctaactcaacaacggcaccactatgtaatgtaaccggtatcgcttgttcagatactacttgtgttaaattttctacctgctccactactgactcaacaacggtctgtacatttagctcattaaccttaggtgtacaaaaaatatctgtaataccagaacggactaaatctttaaccatttgcacagattcagccatggattgaggtccctttccatctgccatagccggcaaaatatatgtatgtaaatctaaaatgcgtttcatcttcttccccattctcatctttatatcgccccttacctcgatataaatctcttaaatataatctctttaattactcaaattcattttgtattcatattataccaatgaatctatgtcttgaaaagtacctatacctaaacttttgataatatttgattgcttaaaattaaagattatttaataatttcattttgttttcacaaaaaaacaaggctcctataaataactcatagaagccttgtatatttaattaaaatccatctattaactatgccgtattcttcgataaatagacagtataacttgtacgacagcaacaccaatgatgacgccggctgtatcgattgctacatcgcgaatcgatgcatgtctaccaatacttgcaagttgcaagcattcatccataacggcaataactaatcctataaaaatcactttaagtcctgcatattcacgattaaattgatgcaatgctacatacaaacatccaccaagtacagcaaactcgaacacatgcgccatcttgcggacaatgcgatttaaggaccacatgtcaccggtgagacccagcttatacagaatcggactcaaccattgtgtcatcttaagactcaaaccatctgaggaaatatcattttgtagcgaattatcccagataaaaaggataacgagaacaactaaagtaaagcttatccaatgtttctttaacatctactatcaccgccactaatctcggtcaaaaatatctctagtataaactttatcctttacatcggccaaggaatcatcccaacgattggctacaatcacatcactaacacgtttaaaatcatcaaaatttctaatgactggtgagtggaaaaaatcatcagcatctagtgttggttcatacacaacaacagcaatcccctttgccttaatacgcttcatgatcccctgtaccgcagaagccctaaaattatcggaatttgttttcattgttaatcgataaataccaacaatcttaggatccttaccaatgatagcatctgcaatgtgatcttttcttgtacgatttgcatcaacaatggcagatatgaggttttgtggcacatcattgtaatttgccaatagttgttttgtatcctttggcaaacagtacccgccatatccaaaggaaggattattatagaaatccccaatacgaggatctaaacatacgccatgaataatctcactcgtatttaatccacgcacctctgcataggaatctagttcattaaagtaagctacacgcaatgctaaataggtattagcaaacaattttatagcctctgcctctgtagaaccagtgaaacataaaggtatatcatctttaagagcaccttctgctaataagtgagcaaacgtatgagcacgttccgaatcttcaccaactacaatacgagatggatataaattatcatataacgctttaccttcacgtaaaaactcaggagagaaaattatattcttcgtattaaaccgttctcgcatctgttctgtataacctacagggactgtagatttaacaatcataaccgcatcaggattaatatctaaaactgttttaataacagattctacggatgatgtatcaaaaaaattcttttgtggatcataattggtaggtgtagaaattataacatattcagcacctgtgaaagcttcgttaggatctaatgtagcacgaaaattcagcgacttattctttaaatagtcggccaactctgaatcaacaataggtgattctttacggttaatcatatctaccttttcaggaatgatatccagtgcaaccacttcattatgttgtgctaataatacgccatttgaaaggccaacatatcccgtaccagctattgctattttcatttatttaccatccttcatataaaaatctttataccatattgcaaaacgtcttaaaccttctcgaagtgttgtactcggtttaaacccaaaatctgtttctaaagcagatgtatcagcatatgtaatcggcacatctccaggttgcatcggtacgagttccttatggcgttccatgttaaaatctgctggtaacacaccagcgtctattaactcttcccctaaaatcgtcacaaagtccaatagattttcaggactattattaccgatattataaattgcatatggtggtactggtaatccatcagccccatttcttcgttcaggagctacttgcataaccttataaacgccttcaacaatatcatctatataagtaaagtcacgcttacaattaccatagttaaagattttaatcacttcgcctttgcgcaatgtgttagtaaatccaaagtatgccatatcaggacgccctgctggtccatacacagtaaagaaccgaaggcctgtacatgggatgttatacaacttagcataggaataggctaataattcattagatttctttgtagctgcatataaggacacaggattatctacttgatcatctgtagaataaggaatctttttattagaaccataaacggaagaggatgatgcatatacaagatgttcaacaccttttgccccattatcatacgaatgacggcaacattctaatatattgtaaaagccaataatatttgattctatatatgcgtctgggttcgtaatagaatagcgtacacctgcctgtgctgctaagttcacaactacatccggtttatatccatcaaaaatagattgtaaaaactctttatccgctatattcccttttttgaatatccattgattatcatgttttaaggaggaaacaatctgttgaagtctatactcctttaaactcacatcataataatcattaacagagtcaacacctatgatgaggctattttcaatattattaaaaagcgacataacaagattggcacctacaaatcctgcagccccagtaatgagaattaccttgttatgtaatgatacattttgtaaaagcatagtctgtcctttcctttaggaacgtcttagtcgtgctaaggcgctatcccatattttagcaagtacaaccctctccgttggaaataaatacaacacaacaagatacgaaataagactgacacatatacagaaaatcgtccaaatcatactattatataaatgcaacaaagcataggaaccaatacctataatggcggaggtaatgatataggctttaatattaaaaattacactccacgcatccatcttcacatacacagctaagagatataaaagtacaccaatcatttgaatccgtactatagaacgagcatagacaaatgtagtgaaatcatattgaacacatatgtatataaccggaattaatacgatgagatgtaacatctgtgcaaggaatgaaatattgggcattcccttagcacgaaacgcttcagatattaaatatgaaatagcggtcacgagagatgagcttaatgcccatgatcctagcactattccggctaacttccactgaggtcccaataaaatttgtacaataaaatcttgatatacaaacataccaacacctaatggaaccaaaaataaggccatatatcgttgaaatgttaaaaatgttttttcaaactcctctttgctatgttgatgtcgtgataaagcagagaataaaacaggagccatcgaagatgtagcaatagccataacagtagtaactatagctgttggcatcttataaacgccaagataatatgcgttcaaaaaatgactaataatgaaggtatctacccatgccgtaagccatatagagaatgcctccgccaaggaccatgcactaaaactgaacatattacgaaatataggatacgaaaaatagatggatatcaatttttcttgtctcacacataatgcaatagctgtaaatagttgtgccactaaaagcccagcaatcaaagaccaataatcaaaacctgctaatgccattggtatagatacgaacaaaggagtaatgatagtaatcattcgtatgcttaagagaaatttgaagttaaaatttcttctatacattgccatttgaatgctactaaatgcactcaatggtaacatagcccccatcacagctaaaggaatacctaatccttcattgccaaccaatgatgctaactcatcacggcagacaatgatagcaatccacaatacaatagctagtactatatttgaaataaaggcaacactaacacttttctgtttagcctcttcactttcaaattcgtattgaacaagaaatttctggaatcccgcatctgctaacatttccgcaaatgaaataaccatcattatagtggctaaaataccaaatgctgtaggggccaaaatatgcgccaatatgatatttgtaattggtgtaataagctttgctaagatctccgttataagtgaccacttagcagcagctacaactttagtatccattgatatccaaatccatttaattacgatttatattctttaagccttgtgaaaataactcatgatgcgcttcacatgacaaataattctgtatcgctaaatataaagatggtattgctgtaaacccattaatcgtttttgtaggtgattttaaatttatagactccatatcaccattttcgaataatatacgatttatatctgtaggaacaaaatcagctccgatgtataccttcaagatgtaaccactctcccatttcgtaatcaaactccattggttccatctttataaatcctgcgccaggaaacaatgttaattctccaatataaagacgatcattcacgtcataaaaatcaacccgtaaaaacggaaaatccttagataattgtttgcataatgatctcatttcttcatagtgtggcggtttttcaaatgtttttttagagggctcataatgaagaatggaaagattaatataattccaatcctcatcataatagttcatacgtgttccacctttagaaaatcgttcagaacaaactacagttagctttggttctccgtgaaaggaatacatcttatagtctaataaatctgcattccctaactcatctatatactcttctgctaaaatacggcgacgtacatttttatagggccattcacgagctataagataaaaattacgctgtaaagatttattaataatttgacgtgctccttctttatcaaacttagacttatctttacaaattacaataccaccactgtcatgagtgcatttcagtacaaactgattcggtaatgcatcaaaatcaatttcatcaaaagaatcccatacacctaaagtaggaatgatgtactttgagtcaatcctatcagctaaatactttttagccttatacttatcaaccatagtagtatatatggatttacgatcatataatttcatccactgcatcttttcactaaaggtctgtggattatctaaatttaatggatatcccatatattgaggaaatatccttcgtaaaaacgcttcatcgcttaaggaatcataagcacccatttttatcatcacccgtaaacggtaataaggatcagagatgaactgctttcccttggtcaagattgtttgtatgttcatgtaatttcttccttttagcccgtaaaatctgaacttctataaaaaataacatcatataaaagtaagtacttttactttcataggaaaccaaacccatatccataactaattgagacataagtaatataaataccatgacatattcattgctgtgaaaatcatgatatcgtatcatgttataaacgagataggcatacatggagtagtatgtaaccacacctataacaccagtacccgccagtaattcaatataattattgtgaaggtagtaattttctcgaccgaaaatagagtatgtatataccgcaggattattaatcccaacgcctataattggagactgatgaaataaatcccaaccaatatcgactaaggccatgcgaacaatagcagaagaatccccaccagtgcctgtgaaagcatctaccatggaactcatacgttctaacacttcactaaaaataggtagctgtaatatacctataaaagcaataattagtatgctcaaataagctactaatttagctaaggaattaacaatatttttactacgaaagcttttgaatacgaataataaaacgatacctataacgacaaataccaatgctttccgactacctgtagccgccaatatacctaatgttggtaatgctatgatgttccaccatcgcggtttatcgtacatcatataatacacggtcattacaatagcattagcacctaatagtcctactgtgtttgcatttaatgcgtcatttgctatacgagccgatgatgaaagaacattgataaaataatcgagcccatagtaatacaccgtatagaaacagacaatatatcctgtccacataccgattttcaataaggaatcaactgatttttctcgctgaaagcacatatacaaaacaatgagcatacaaaatatttttacaatatcaaagcttctactcatggctactgatggatcaagagcatttagagaactaagatagcaaacgcctatgaatagtagcatatacatatgcatccatgtaaatgacactgtaattcgcccctggtctcgtacgagataacatagtattaatccaaacaagcatacgaatagcacataggcaccgtaatctgcatcgccgagggcgaacgatatggtcaatgaaagtacaagaaatactaatgttataaaccatataagacgattagatatggtcgtaatatttaacttcaatactgtccctcttctctcaatatatgtacatcacaacactaatttttctataaaatatcaatccaacgtttagcaattttacttagtggaaatgtatctcgcaccttgattgcttcaacagatatacgtttagccaactcaggacttgctaagatggatttcattttttcatacatcgttttcgtatcccctacaggcactagtaatccattgccaccatcttgaatgaccatacgcgcaccgcctaccgggcaatctgtaacaactacaggtagccccattcccatagcttctaacatggagttagatatgccttcaaaatcagacgatgacacaaacattgtacatggtcgctcttgttccaagatgttagttgcgaaccccggtaaaagaactctgtctgttaatcctaaatttgcaatttgttgacgaagttcatcctctaggataccttgaccataaatgacaagtttatattccttaaactcatctgccaacatgctaaatgcattaatcatcataggtaaattcttttgcggatgcaatcgacacgcggttacaataatcttttcacgttctccttcgtaaggttctggtaaattgccattaatcggattcggaatgatatgcccacggctttgtatagacttagagaaatatgatttcgcatcttcagtttgaaatactatggcatcagcaaatcgaaacgcaaagtctcgaagcatttgttgatgtttgccgacaggcaccttacgcggattatttcgttcagaaaataccatgcgatttttcacaaaccacgaactaatagccaatataaaactggacgcactcagaaatgataaacacgttgcattaggacgttgttttaatatgccaatgagtgctttaatttcttgtaaaaatcgaaggatcttattggaactggtcgtatgtatttgaatttgctctataccttctggcaatgcatattcggtgccatagcgattgggacttgtttgaataactgtaatctcgtgtccatcatgatgccattggcgagccaattctgttaaaatacgttcagcaccatcatttccaagggaaatagtaacaataataatttctttacccattttgacgctcctctgtgatatattcggctaaacgtatatatgcgtctttcattgttacctttggttcccatgatagattgcgcatcttcctagaatttaaaaacatatgaactgtaggcgcatatccaaaggaggacacattttcaggtatatcaaagacaacagaaactttatcgccccccacatggcacgctactaaattggcaatactagcaatactacgagtttcctcgtcatggcacacattataagcttcgcccatatcaccttgggtcatcaaaataataatggcccgcactgcatccgtaatataacagaagttggacatggaatcgcccttagtatgaagaataatatcacgaccatccaaggcatgttgggtgaactgcataaacacccgattatcatctaacggcacaccagcgccgaacgtctgcgcaaggcgagcgattttaacaggaacaccaaattcaacagcataggatttacaataacattcgcacatacgcttactttcagaataggaactgcgaacgtttagatgatctaaatacccaatgcgatcctccgtcataacttgaccagattcataaggtataccatactgttccatgctcgatagatataccatacctaaaatccgctgttcttttcccagttctaacatacgttccgtaccatgtattgatgtacgaatcgtatccaccggatgttctacaaaatatttagattttgtaggggcagccccatgcataatatagtcacatgctacagttagagaatctaatggcctatcaacaaatgtgattgcttgtgaatttagaatatccccaaacataaaatgtgccttttctatattgcgcacatggcatatgacatgtaatgaaagatggtaggcatcattggcggctactaatgaacgagccaccatagagcctattaaacctgtagcacctgttacaagtattgtcttatcctgaaacgccttaaatatatgagaatcacctataatttcttgtatgtctcgttcaacaaccgtattaattgccctcacctccactttctctattttttaatatacctgtgaacatataataatctgatggggttgtaatcttaatattttcaggttccccccatacggggtacaagggatacccataatgcatcatcatagatgcagaatcgataaaatcatgaattccttcagctattgatgtatcatgaactgaaagaatatcaacgagcctaaaactctgaggcgcttttgccatcaaacattgttgacgatttaaaatcgttttgatttctccatcatcagtaaccataactgtttcaatagcaggagttaccgtaatggcactcccctttgtttcaacagatcgtatatttctaacaatggtagaacgatcaactaaaggtcgtacaccatcatgaattagtactgttatatcatcaacaccatataatcgtttcacttcaagcaaaccgttatattgagagtccagtgcagtctcgccaccaggaacaatggatactattttttgaaggccttcttttgctatcagagcccttgcataatccatccagtctgacttacacactaatacaatgccatcaatgaagggttcttcttcaaaaatggatagtgtttgtatcagtataggcttaccattccattcaaggaattgctttggcattttatcatttttcatacgggatcctacgccaccagcaaagataactgctattcttttcatagaacctcccttaactattaacgatgtttatttactaaataatgaatgcccttgtaattggtataactacgatccatatcgatatatacggcatcatgctttgctacacgctgttccactgggggcaattgcatatagtcgccccaaatcaaacgtaagtatcgttcataaccagccataacgggaatttgatgaccttcaaattccttatatacaacgtgatcaaaatcttggcgtgggtggcgtaacttcatacctttcaaactaccaatcagttccgttacttcataggatgtttcaaaatcatattggctcatttgtttttctgcaaagcgccatatgtgataacgccacgaaggtttagaaatcaccttataaatgcaccctgccatcatgcgatataccttccccttgttatcaggcaaccgttgtgcattaaacaaggcaaaggtcatggcccacattaattgaaagaatcgtttgacagtaccctttggacagccatcgatgggcataatttcaagggctaatccatgacaaatatcttcattcacactatggcgattgatgaaagtcgtttcttcatcgcgaattgatgcacccgcatcatgatagattttatctctagttgtcctacaataggtatatcgtttatcaccgtgtataggccaaagttcagccaatctttcataatcaggacgaggcataaaaatatctaaatcatcatcccaagggataaaccctttatgtcgaatagcccctataagaccgccaccacataaatagaatcgtagattatgagcatcacaaaattctttaaatactaaaagcatattcaattctttagcttgtatatcatgagctgttgtttctgccatactacctttctaacgtataacggccaataccgtttccaccataacttttaattctccaatgaacgagaattctttaatacttcgtaaattccattccatctttgcaggcaatacattatgaatgtagcaatcatcaacatcatctgccgcatctaacaaggtatcttcatccttataccgaatactagctacactcgttacacctgcagggatcaacaatgtcgctttcatttcgtctgtatatgccgctacataccttgggacctctggacgtgtgccgacaaaactcatggtaccttctaatatattgattaattgaggcaattcatcgagtctacattttcgtaaagcctgtcctacagatgtaacacgcatatcgtctttagacgtaacttgtgcaccaagctgttcagcattttgtaccatagttctaaacttgtaaattctaaaagatttaccatactgcgtgacccgttcttgtctaaagaatacaggaccttcactatccagttttatccataccgctaataatagaaatatgggacttaatactactaatagaatggctgccattaagcgatcaaatacagacttaagcatcaaatcacgatgtttggatgctaagatgtcgtaataaggacgaactgcttcacatcgcatatcattgggcaactcctgccatgatttccaaatcataatgcacctaaacattctttaaatgtatgaatcacatagcttacctcttcatctgataaattagtatgaaggggcaatgtaatttcatttttgaactgattatatgcattcggataatcatcgatagaaaatcccaagtttttataagccgtatgcattggaattggcttataatgcacatttgtagcaacacctttttctgccattcgttcaattaattcattccgttgttctatggttgcatcattgatacgcactaaatataaatgaccactactcatatgctcatccgtataatgaggtactacagatacaggacaatctttaaacgcgtcattatatcgatcaataatttcacgacgccgttctaataggccaggatatcgttctaattgggccaatccaatagcagccataatatccgtcatattgcacttataataggtacctttaatatcatattcccaggcccccatcttagttttggccaatgcatccttatcctgaccatgtaaagataatagttgaaattccttatagagagcttcatcatcaatgccctctatatgattccacgtagcacacccaccttctgcagtagtaaaattttttaccgcatgaaaggaaaaactactaaagtcagctacattgcctgtatgcagccctttataggttgccccaaaagaatgtgcacagtctgcgacgattggaattctacctaaagcacgttgtatatcattacttggtacaaataaagattttgcatcatttacaattgtaaataaacggtcataattacaaggtacaccaccgatatcgacaggaataatggcctttgtcttatcggttatggcagcagccaccttatcatagtccatttcataagaatcaggtgctgtatcgattaatactaattttgcccctacatgaactacaggacttgcactagccgtataggagtaagcactagttataacttcatcacctggtccaatacccaatacgcgaagaatcatttctaaggctgccgttgctgaatttaagcacactgcctttggcgtccctaaataagttgcaatacgtcgttctaattccttagtacgtggtccagttgtaatccaaccactttttaacgcttctaccacctcattgatttctaattctgtaatatctggaggagagaaattaattttcatagctttcacctatactttccatttattccatatcaataaacactgatccgataataggtactccaatttgctctaatcgttgtttagctaatgccatatcatcaggttgaacataatcaccttttacaactaagagaaccccatcagctttctcagctattaccaaggcatccgtaacacttaataccgatggtgtatccactatgatgacatcatattcatcacgaatgtactcaaataccgtagataatcgatgggaatcaaccacctcggacggagattccactgcaataccactggtaattagatctagatgaggcatcacatgacgatgaatcgtcaaatcttcatccataatgatatgatttgttaatccttgattttttacatcaaatacaacatgttgtactggattgcgtaaattaccatcaattaacagcaccttgtcattattcttggataaagaaatcgctaaattagcggccacctccgatacaccttcacctgttgtagcagatgtaacacacaatatttttctattttctgcattacagcgatactgtaaattgctacgcaatgttcgataagattccacaagaggcgtatcaccatattcatttgaaattaatcgtatcgtatccatcttaacctctcaccttgtacaaccaacgcaacaccttattcttaggttcttctgtgaccgatttattgtgattaggaataacacctaacatcggcacctgtaacatatcttcaacatctttagcagtctgtattctacgatttcgcaaggagttaactaatgtatacaaacatcctaaaattaaaccgataatagcactggcaaccataacaagtacacgacgaggagcaatcgctttttctggtaatgtaggggcatcgacgatttgtacctcattcggtaccataacctctgccaccttagcttcttccagacgtttagaaagcatttcataaatatcttgggctacatctacatcgcgcttagcttgaatatacccccgttccttttcaggaagtgctttcatcgcagcttcgttatctttgtctaaatcagctaacgtagcctctttactttgagctactgctaaagcagcttcatttttaaatttatctgctaataaaccttgttgagcggagttacttgatggagcttgctgtgaaacaatagcatcgatttcctgttgtaaaccggcttgtgctttagcaatctgatcatttacttccttcattgcaggatgtgaatcagtatatttacctacgtaacttgccttacgagcctctaaatctgctagttgtgatttataagcttgtaccgttgagctatctgcaatactagcacctgccgaacctaaatccgcattaatgctacctaatgcagcttgcgccgtttctaaatcgagcttattttgtgccttttcacgatcgattaacgtaatcttatctgtaagccccttcatttgatcattggtagaataaattttattatctacttgaaattgttgaagctttttctctgcttcagacaattcctccttcgctgttaccactcttttttgtaaaaactcacgagtcgctttttgttcaacttgggataactcggctaagcgttttaaaaatgtatcaattaataactgattagcttcttgtgcctcttctggggacttaccagtcacactaacttgtaataactgtgtttctttatatggctttgtctcaatacgatttttaacaaattcttcatacgttggtagcttactactatctccggcaatttcattgataacaggttccacaacattacgactttttaaaatctctgcatcagtgttcatcaattgacgagccatcgtatcagagtagcttgggtcactagatagcactgaattacctaagccttgtgtctgtttaatacgtaacatagctgtagactgataggtagatggtgttacgattaggtacgcaccgccaaggagaatacaaatgccagtcacatttataatagttcgccgttttctaacaagaattttggctatatcttttatatctataatttgttccatcccaatacccctttcaagtaggcatacaacaccgcggtctctctttccgcttaaatattatggttaggtgtatatgttggaataatatcctgtaatacgccaattacatccatatcagtttcacaagaatcaaaggtagcaattttatctatcaaccaatcacgatcaacggtatctaatgcggcttcaaaaatctttgtatgattcgttcgattagttccttcttcagatgtaagtaattcttcgtatttcttttcacctggtctaaggcctgtaattttaatatgaatgtccttatcaggttccaatcctgataaacgaatcatatttcttgctaaatcaatgattttaactggttcacccatatcaagcaaaaatacttcgccacctttgcccatagcaccagcttgtaacacgagctgactggcttctggtatagtcataaaataccgtgtcatttccggatcggtaacagttacaggaccacctgcttcaatttgttttttaaataaaggaatgacggaaccacgactgccaagcacattaccaaaacgaacagtaatatatttcgtatcatatgtatcattcatagatatgataaccttttctgcaacgcgctttgtggcacccataacgctagttggattgacggctttatccgtagaaatcatgacaaaccgttctacaccatggcgacctgcgacgtcggctacatttcttgtgccataaatattatttaaaacggcagccatcggttgaatttccataagaggcacatgtttatgagctgctgcatgaaatacaacttgcggattatattgagtgaatatttgatctaattgttgtttatctctaatatctgcaataattggtataatcgggccgtctttatatatatttttcaattcttgattgataaggtatatactattttcaccatggcctaacaataagagctgtttagggccaacacgcataatttgacgacaaatttctgaacctatagatccaccagcaccagtaaccaggacaaccttatcgcgaatataatgttctacaatatccatatcgagacgaacctcatcacgttctaataggtcttctatggatacaggatgtaaatgggatactagtacctcatcatctaacaattgatacatccccggtaatgtattgactttacatttaagaggtgaacagatttccatgatatttctgatttcattacgtgtaacagaaggcatggcaattataatttctttcaccttattttcttttacaatagatgggatatcatggcgattacctagtatacgaacgccgcccattagacgattgaatttagactcatcatcatcgatgaaaccaattaccttacgagaccgtttatgataccgttcaatttcacgagcaattgtggcacctgcatcacctgcgccaatgattaaggtatttaccatatcagcatcagtactttgctttccaccatattgcatggcaatataatggagtaccattctaccaattccgataacaccggtactaagaatccagctaatcaaatatatggatctaggtaaagatttatcaaatacatacatcccggtatagaaaagtcctgctcctaaggtggtcgcaatcaatacagcaaccatttcgcgcatacctgcatagcgccatatgcgcgtatatagatgcatggacaaaagcataacaatataggagattaccattataggcaacgcatctatcatctgatgcagataatgtgatgttatataaccatcaaatcgtataagcaaactaatcaatgccacaccaataatagtaataacatctacaataagtaataagccgggtaataaatatgaacgcaatgaaagccccccttatatgacttacatatgatactatttttactaattagtctttacctatgcgagataccatgtaagcacctgtcaaaataggagcaatatctctagagaaactaatcttactgttcttagtgaagtacaagatatcgccttcacgcataacgtaattttgggacatatcaccagttttcagcatattatttaaattgatttcaataggttttgtaggatcattttgatgaattaagaatatcttctttttagccgtatcccaattgaaactaccagcggccccaatcgcatcaataacggtactcgattttgttaatgtataagcacctggtttattaatttcaccaaatacataaacgcgtacgccacctaattttgtaacattaaccgacacatcaggattgataatgtatgtggataatgcgttagatacatttcgggtgaattcttctactgtcattccatccgccttaatattacctgccataggaatggatacatatccatctggtcgaatggtgaaagttttatttgcacctaaatctgcttgttgcactacatcaatcatgagttcatccccttgtcgtagacgatactcttgatcagaaccaattgtagatgcagacgtattcatatttgatgttgtaactactacaggagaaacatcctttgcaaaacccgtagtggctatcgtacctatgacaagagataaagcaatccatttttgattcatacatgcacctcatagcattcatttcaattaacaaaacaccttaacacaactatttaaataaatttaatatttaattaattatcgtacacatattttatcatcgtttctttgtaactactatataagcaagatgaagcttctttatatagttttcatgaagcaccaagaatgctgaaatcatctatatttaatgcctactcccttatgtgtacttttctacgcatatcgaagtgttgttttgctctatatatttctattactaataaaaaatttctatatttaggagtttgcaaaaaaaatggatgtatatatccgtttaataatagatatatacatccaaataaattatatttaattttattcgacacgaccgcccaaataagcttccatgacacgaggatcatgtcgtacttcatcagctggaccagacaataccattttgcctgtttccaatacatacgcataatcagcgattttcaatgcttgacggacgttttgttctaccaagagaacggtggtgccttctgcactaatttctttaatagtttcaaagatttcgtttactactaatggtgcaagccccatagatggttcgtctagtagcaataacttaggacgggccataagagcacgaccaatggcaagcatttgttgttggccaccagataatgtaccacctagttgatagctccgttcatcgagaattggaaagcgtttaaatacctttttaatatccgcttcaatctcattatcattgcgtatataagcgcccatttcaagattctcgtaaacgctcatatcttgaagaatttgacgaccttcaggtactaaggaaataccattatgtacaatttgatgagttttatgtccagtaatgtcttgaccctcaaatagcaccttacctgatgtaggctttacaaggcccataatagtcttcattgttgtcgacttaccagcgccgttggcaccgatcaaggatacgatagacccttgtggtacttctaagctaatgtcttttaaggctgtaatatgtccataaccagccacgatgttttctagctttaacatattacacctcctctttacctaagtatgcttcgataacagcctcattattttgaatttcttgaggtgtaccttcagcaatctttttaccaaaattgaataccaccaaacggtcacagatattcatcatcaattccatggcatgttcaattacgacaacagtaatacctaagtcgcgaattttaccaatcaattggcgtaacgcttccgtttcactgtcattcatacctgctgctggttcatctagcaaaattaattgaggatgtgtagctaaagcacgcgcgatttcgagacgacgttgcttgccatatggtaatgatgtagcaacttcttcagcatcttcttcaagacctacgagttttaaaaattcataggcaatgccacgacaacgttcttcttcaatacgttggcgttttgttcttaagaaactagcaacgaaaccagaaccagttcggcaatgcataccagttaatactgtttccaaagctgtcatattgccaaagagacgaatgttttggaatgtacgagcaatgcccatttctaccgttctatgaggcttgatgcctacaacagacataccatcaaatacaatttcgccagaacttacagggaatacacctgtaatcaagttaaagagtgtagtcttaccagcaccatttggtccgataacaccaaaaacttcaccttgcttaacaccaaaggatatgcctgtgagagctgcaacgccaccaaagcttttacttacttcatttaattctaatagcattcagttcccctcctatccttgtttatcttgttgtttacgcttatacgcttcaaaacgttctgttaatacttgtgtttcaggaatgtatggagcttttttaaagcctaatttacgactaatcttatctaccatagattcggttaaaataccatctgggcgaacagccatcaaaatgactaacaatgcaccataaatgatatcgcgatagtcggataagaatcgcaatacttctggcaacaatgtaagaatgaaggaaccgagtacggagccccacactacattagaaccaccaaatacagggaacaataagatttgtactactttatgataactgaagtctgtagggttgataaagtttgtaatatgagcatacaaaccaccaccgataccagcgataaatgcaccgatgatgaaagccatcattttatagtacactacattaatccccatcaactcagcagcatgatcatctgctttaatagcggcaaaggcacgaccgacacggctattgttgatacgtacacagaaagcaataataaaaatcaaaacgattagtaaaataatgatagctataatgttgccccatgcaacagcatcgattcccataaggccatcaatatcaatttcgtaagcaaaatttgtcaattcttgaggaatagatggaatgccggatagaccaagagcaccatttgtcacatctaagttcaagaagataacacgtactacttcaccaaaaccaagtgtggcgatggcgagatatagacctttcaatcgagttgttggcaaaccgatgataacggcaactaaagcagctacaaagccacctactaaaataccaactacgataggtaaatcagctttcaaagaaagcaatgcacccacatatgcaccaacactcatgaaaccagctgccccaagggataactgtccactagcaagggtgaaataaatagagataccaaggatggcattaatgatgaaaaacatcacaatttgtagataataagggttaaaaatatccattatggtctgccccccttatctttagaaccaaataaaccttgtggtctccagaataataagacaatgattaaaccaaaggctaccgcatcacggaatgtagatgcaccataagcaacggagaagatttccgcaatgcccaagataaagccacctaccatggcgccagtaatattaccaagaccacctaggataagtacagccaagcctttaaagcctatgataacacccatagtaggctcaatagcattgaaggaaaggccaacaagtacaccagcagctgcacctaaagcagaagcaatcataacggtaacagaaataatcatcgttggattgatgcctaagagagctgctgtttccgtgctcatggatacggcacgaatggctttaccaatcttagtctttttaataaccacattcaaaataatcattaagagaacagaaacacctaaaccgataatttgcaccatggagattttaaataccccaaagtcgataagtccaccaatataatctggtgggaaggatctagtttgaggaccccataataataatgccaaactttcaaggaagatggaaacaccaatggtgctgataagtggtgctaagtgagacacctttttcttacgtagtgggcgtaacgccacaaattctaataagtaacctagtacggcacctacagccatcgctacgataagggctacaaatatgtttacgtcaaaaacagttaccataaaaagaccaacgaaggcacctatcataaagatgcctccgtgtgccatgttgatgatatttaaaacgccaaacacaagtgttaagccaatagcgagtacagcatataagctaccgagggttaacccgttaactaattgttgtaaaaacactatactacctcaacttttatttttttaatgcgtcaaattgaccgtttctaatttgcaatacttgaacttccatggaagggtcgcggtggtcattgaatttgaattgacctgttacaccaacgaagtcggcaatatttttcaatgcttcgcggaatttttcacgatctgtggtggagccagattttttcaatgctgcttcatacaagtaaactgcatcataagcttgcgctgcgaattgatctggttctttaccgtatttatctttataagctttacggaagtcttttaccttttggtcatctttgttagggaaccaaggtgtacctacgataacgccatcagctgcagcacctgcgattttaataaattcaggactgttgaagccattggaaccaactacaggttgtttcatacccatttcacgcatttttttcataatcaatgcgccttcttggtatagagaagcaacaacgattacatcaggattagcttgttgaatcttagttaattgtgcagagaagtctgtatctttatctgcgaatgtttcagtatcaacgatttgtacaccttcagcttccaatgctttacgagctgtattatttacagataccatttggtcattgttgttggagtacataatagctgcagttttaaagttcaaagttttatgtgcttctttaattgcagtatctactgccaaggattctggtacagcattacggaaaatgtaatcgccgatatccgtaataccttcagctgttgtagatgtaccaagagctacgactttgctcttatttgctacagggccagcagccatcatttcaccagataacataggaccgataacgcctaccactttatctttagaaataactttgttcatagcattaattgcttcgtttttatcacctttagtatcttcaacgagcaaattaatttttacattgttagcgtctgcattgatttcgctaacagccaattctgcaccagctttgatagattcgccatacgcagcagcaccgcctgtagttgttgttaacaatgcgattttcgcttcattattatttgcattacctgcatctttattgctaccacaaccagcagcaaccgccattacaccagcaaggccaaaaatggctgctttttttaacatggatttattcatgttacacccttcctttaatcacaataacagcaattataatagtataaattatatatacttctatattatgaaatattttttatgtttgtcaattaaatcatgtatatcttctatagaattcagatatacaacttataatttttatttattatgctaataattctgaaaaatgttcccatttctcatacaacttttgtaagttgctttccgtatctgaaagctgcttagatatgttttccatttccgctaaatcttgttggactacaggatttgctaattgtacttcatacattttcatggtcgcctctaatctagcaatttcttcttccacttcagctaattgcttttcaaccatgtatgtatttgtttttttcttaggctcatcagatggagatgtagaaatggttttagcttcagatttcacatcttccttagctacttcttctactacttctgtaagagcagctatatcctgttgctcttttaatttctctttatagtaagaataattacctaagtattcagtaagacctttattctctaataccaatgttcttgtagatacttgatctaagaaataccggtcatgggaaataataaaacacgtaccaccaaattgctgcaacgcacgttcgactatttcacgggtaggtacgtctaaatggttagtaggttcatcaagaatgaggaaattatcaccttgtaagaataattttaacagagctaaacgcgctcgttcaccaccggataaatcacctactagtttaaatacatcatcccctttaaataggaatgatcctagtacattgcgagctttctcttcggtgaaattataattattgataatctcatctaccacttgccaccgatcgtgtaattcttcatgttcttgtgaaaaatagcccacttgcacacggttgccaatatcgatatgaccttctgtagggaataactcccctacaatagctttcaccatggtagatttaccagccccattaggaccgatcaaggcaacagattcgccgcgccttacaactacagatacatcatcaatgattggatcatccgttttgtagccaatagacacatgatctaatacaagtaccttatcagcactcatagcagccggtggaaatttaaaatctaacgaatgtgaagtttcaggagcctctagtcgttctaatcgatttagttgagattggcgacctcttgccatcttagacttaataccagcacgatacttatcaatgtactcttctgttttcttaatatattcttgctgcttttcataagcaatcgtatctgcttttaaacgttcttctcgttgtgccacataacgactataattaccgcgatatgttgtggccttgtgatgatctagttctactacaccagtaacgatgcgatccatgaaataccggtcatggctgacgatcagaatgccgcctcgataggatgatagataaccttctaaccactccaacatttccatatccaaatggtttgtcggttcgtcgaggaataaaaaatctggactccgtactaaggccttcgccaaattaatacgcgttttttgccccccagaaaatgcattagccggtttatatagatcttcatcggtaaaaccaagaccatagactatgcgttttgttttttgttcatagtcataaccacctaaccattccaatcgattttgtaaatagtctaagcgttgtaagtcactttcactagcctcatgagtctctaaatatgtggttaactcttgtaatttattttctaatgcatgaacatcttcccaagctgtttctatttcttcagctaaactagcatcgcctaagttaacatcttgttgcaaatagccaatgcttgccacaggagacattacaacttggccttcatctaattcctcaataccgaggatacatttcaacagtgttgatttgccagccccattagggccaaccaaggcaattctatcgccttcttttatttcaaaggacacattggaaaacacttggcgcaccccaaatgattttcctaggccgatcattcgaatgcgttccattcaatacctcctttatcatttcgtaactattattataccacagtcgctttcaccaaaatgaccatttccacgctatcctttgtcttccggctatgtctaaataatttacctaataaagggatatcaccgagtattgggattttctcaatctgtttttgatcccgattatccattaagccacctatgaccaatacttctcctggttgtagacgcactctagtctgtgcttgtcgagtagttattttataagatttcatctcagataccataatgggtgaactcacctcagctcgtatagacgtatcaatgataccatttttcgtcactaccggtgtatagtcaagtttaataccgacctcttcgtaatgaatggatctttttctttcaccattagaaattgactcttcgattacaggaattcgttcacctatcaaaatatgtgcggcttcaccatttaaggccataatggaaggggttgcaataacaactgcctttcccgatgtttctaaaaggctaagctcaggtttaacaaaaaatttataagcttccccatctggagcttttccaaaagaaatagcaccataagaatttgtcttatccttaccatgaccagttaaactcagccaagaccatctaaatcccgtctccttcgtataggaatgctccatagccataatggtggcttccaagcgcacttgtttcatatctctatctacagattgaatgatagagtttacccctttttcctcgtctcctgttacatttaatacaatctgattcgtttccttatgcacagcgaactttccattaggtactactgtttttatgacagattctagcgatgtcgatgatgccatctttggttctactaccactacatgacgatgctccttagcactagaatgccctgtaacggttaccacgccctgatcatcctgtatatcaaaatgatacatatcccctaaatgatgtagcatgtctaatggtgacttaccgtgtatcgttcctgtcacagttccgttcaaggtgttaataccaagtatatccattttataactacgactgatggcctctaccacatcggacaaaggcgccttgctaaccgtcatactatatgtattttgaccagattcagattgttgtacatgtatcgattctttcgcccatacacaaggattttctattacacctaagagtaaaactataatcatgattcgccaatagatacacatcgtacattgcctccttcatcaagggttacaccattttcatctacattaattacctttacaccatgccaagaatcgccttccataacaacagtagattctgtgccactgcttaaaattacagcccattgaggcccatgtattacgccattaacatgaattgttttctgcttattatgttttgttgtaactgtttctgcactagaactgctatcttggtctactttcttctgactatgtctccgtttaccttgttttaattttgatgaatcatctttattatctaagttctgctgaccctcaccgctatgttcttcatccatcatatgtattggtgctgcatttcttttgtctaatgattcgcctaatacctcacgccaagaaagagctcgcaagttattactcgtactgtataataatgttgtttcatgagatttatcttctgatttcgacattgccgttgaatcaggctccatctggacataatcagcctcgggtgtataaaatatgccccaaccaattgctattccgcctaatacaaacaatacacctagactcttcttgtatcgtttacattgagtcacataaggatacaatttttctcgtaaacgttcctgtatgttcattcatcaggactcctttcacatagtagaattaaaatatctatctaatatcagtatgcaacacaaatatacataaaaaaaggacactaatagtcacccccgtgactattagtgtccttgacaaatcatacaatgtataatagcaattattgttttttcatagcttgaagttttggaccaatcaagcgtttataaacttcaacaccaggttgatcaaaggcatcaacaccagctaaaattgattcaaaatacacagcccaacaatgcatgaacataatttcccctaaatgaaatgcatttaatgttggtaccgatatggtcatattaaaacgattatctatcgatagggcctcacgatttgcatcaagtgcgctatttaagatatcgctaataggaatatcaccaattgcatcaagtttatcgtactcactatataaatttggaacaaccaatgatgtattccaatctcgtaccttaataaattgaactaccttattaagacgcccctcttggtgttcttgcacttgtgcgtgcatatccatcgtgcctactgcaggaacaggtgtacgtccataaggaagacaggtattactcattttacctaatgattcggataagagctgtacataccaatcggataaggagtgtagagactcaccataaggcataaatacctctataatacgtccatatcgctcagatgcaatatatttcaataatgcactaaatagtgcaggatttttataaacatcctcttcttggcaagccatatccatcgatgcagcaccggctaaaaatccttcaatatcaaatcccacaagagcagctgtaacgaatcctacctcagtaaaaacggagaatcggcctcctacaccatagggaacggagaatgttctccattgatgcttgatagccatatcatgaagaatagtaggatgtgcctcatcatttgtttctgtaacgacggtaacttcataattaatatgatgatcctctagtgctttttgaagaatcataaaattagccatcggttcaatagtggaaccagactttgatgtaactacaagcataactttatagtcactacccttttcatcggcctgagatactaaggttttgataagcccttctaagtatggaccatctacattaaacccagcaaaataaaatctcggatagccgttgcgttcttcatcagtatagttattccaaaatgaaccacattgcacatcaaagagtaccttactacctagataagatccaccgatgccaatagaaacaacagtatcaatacttttacgagcatagtcacccaagtcatgtaaacggtccatcatatccggtgtattgatgccgttttctgatatatatggcaactgataaaacaagattggttctggctgaccatctttagataggtggccttcttcataacctgtggatcgcaaaatattggtatgacgccatacattttgaatggcccgttcaaagttttgtatgtcccttgcctgtatgcagctttcattatagatattgttataatctagctcaaatccagaatctaactgtaacatcaagtatctcctttatgcaccaatccaaccatagccataaccgataccaaatacggaccaaagaatagcgatgggaatcaataacttaaatttcaattttgctgttttatgatgacatactaccatgcccaataaagcgcctaaaccaccaaaggcaaaggctaaaaatagcaatgtaaattcagaaatccgctcatacccctttatagcggataacttatcatatccatatatacaaaagacaataaaattccatacggtcataataatcagaaaatacgtttcactcataatcctatatttatttccccttaaaatatgagaaggtatcacccaatccacaatctaaactaacagtggcttcaaatccaaaatccttttttgcttttttattacataagcgagaatggcgtatatctccaacccgttctgcttcataattagttacaatttctttaccactgatagatgtaaaatagcctaccaattcattgacagatgtactcgtattggtagaaatattataaattcctgttaagtcaggatgattcatagctttaatattagcctcaactacatcagctacatatacaaagtcacgtgtttgctcaccatccccaaaaatggtaagcggcttatcctcattaatgaggcggttgaaaatactgattacaccgccttctccaccatccccttgacgtggcccatatacattagcatatctaaagcatactgtttttaatccaaaagcttgttcataaatacgtaaatatccttcagctgtcaattttgtaaggccataaaatgatgtcggtttaccagacatgtcttctgtgagtggtaatgtatcgagatcaccatacactgcagcagaggatggcattagaaaatgtgaaacattatgctttctagctgcttcgagcatattaattaatcccattagattcacatcacaatccatcttaggattttccatagatgcaggtaccatcgtttgtgccgcttcatgaaataccacttgaggtttaaaatctgcaaaaatagattctatgttaacgtctcgtatatccatttctatgaatgttgcttttggattaacaaattctcgtacccctgttgtaagattatctattaccaatactgtatgacctaatgctatgagtcgatcgaccagatgggaccctatgaatccggcgccccccgttacacaaacgcgcattgttttccccttttagattatttacctatcgctgcccctgcctttgcgagttggtcagccatttcattatatgtatcaccagtatgagcatgtaccttgtgaaagtatactttcacatgtgaaaatatacgttcacaaaatgctgcatattcattggttaatacattatttcgtttccacttcttcgtggcccacatttcaatccccatataatcataatataaggaacacttagaaattccatgagttaaagcatattccataacatgcatggccgccaataactcaccagacacattccaaaactctgtatatttctcatcttttgtgccgaacgaaaatgtttctttatttccatttagaaacataataccaccggaacctaccgattgattatatttgtcataactaccatcaatatatgcaattaaatgattggtttctgagaaatcgggagctatagatttctttgtatggtttgttttagacgtttttgatgatgctagataatcaccaatactcacaccttcatcacctataaaagcctgggcttctgacttagtgggaaacgatttataaatagctccaccaaaacctttgacctgtttttcacaatcgctccaagtttcataaatacctggcgtacggcctgcttttacagcataaaatttctttgccatacaacctcctaatgcttcatggtaagcggtacaaattcagcatttaccacagattgtaaatcttgtggattaacatgcatctgcatgcctcgtaaaccagcactaacatatacagcctcttgagcttgcatcgtttcatcaaaatatgtaggaaatagctttttcatacctaccggcgagcaaccaccccgcaaataaccagttatacctaataagtccttaacatgaattaattcaactgatttattaccactgacacgagcagcctgtttcatatctagttcttcagctacaggaatacagaatactacatatcctgttttatcacccttgccaactaaagtcttaaatacttctttttcatcaagacctagttcatcagctacatgaataccctgacctcgttcttcagaccattcatattcatcaatcgtatatgctatgtgatgagtatctaatatgcgtaatgcatttgtttttttatgcttttccttactcatacaagagcctcctatttattaacaattttatttatattctttaattcaatgcgtaaagtaccatcatcattagttttaatttctataaactcccgattttgcatatattctacagggaacgaaatttctatgccagtatcggttttaatcttatgatgttcgcctaccttcgtagcaaactcacgatttaccggtaaaggccgcatcatatcctgttcagctaactcctttttagccgcttcttgttgaatggggttagacttaaatacctcttccacaatgcgaataggattaaccgtatcagatacttctgcatttttagcaatcatagactttgccatcgtcagctctgctacaccatcggattcgtgcgcttgagccaccttatctataatggtttttacctttttaacagtatccctagaggattgatctgtaccgagttgtaacaccttatctgctaagatataacaaacttcaccgtcatattcaccttttggttcaaaaatacgaacagataaatccaatgtatttatggcaacaaaagctcgcaacttttgtgtcggcatcggcaataccgccttatgtggtacaagttctgtcgataaggagccatcatcttcactaaacaattgatgcgtaaaggcatcatgagcctggcataatagcatacaaatataggatgtatctgtcaccacatcgcatacaatagtatcaatgacaacgcctactgtggcttgcttcatatagtcaaaagttttctcccctaactctttagctaacgtgataaaggagatttcaccagatttatattcaccgattcgctttcccatagggctatgtgcatgtaacgtccctgttctcgcaccgggatctttaaaagctttcgttacatggcctgcaatatagtcatgtatgtcttgctcacctatttttaattcatgttcagaatagaccgctaaagatgatgtaaaatcaaaaatctctagggctgctttattaatttgcatgataactcctaaaggataaaaatattactctttattataccattcttttagtaattctttgtctatttttgaagaatcaatgattactagttatttcacaacatcttcatctagctcttagttcacaaaaataaataagaaaataatataaataaggaggtgtatatatacatagacacctccttatttatattaaattttaattttagtagctaaccacgcagcaactaaacattttacaatatctccaggaatataaggaaacattgcagcagttaatgcagcccaaagtggagttcctgtaacaagcataaatcctataacaccaaaaaaatatactacaggaattgttataacaatagagcgccaagcataagaaaaaaagttttgagacttacctttgcaaatacttaataaagtatatgctattggccaagaaactataaatccacctgtaggaccccataatttagctaacccagacgttccaccagcaaacacgggaacccctattaagcctaataaaatatatactaaaaatacaataaatgcttccttaggtttcaacattaatccggttaatgtggcaaccaaagttaacgcaatcacaggaacaggactaaatggtaatggaaatgaaatccatgctgatacacacaatagcgctgttaataaagccatttttgttaaacgtcttgcttccataatatacctcattcacataaaattttaattcgttctatgctcatcatgaagacgagctttaaaaagaatcatatcatctaatttgccaactaagacattaccttcacgttgacgctcaataaagacacaatcattagcaagcataggaactaaaaaacgaatagacattcctaacgttgcgttactatttagcatatgtttccaaaggtgctccagtatcagtaacccaggcacgacataaggaacttcacgatgtatacgattacgatcatttacatcctctacaaattgtataatttcatcctttgtaaatgaaatacgtttaagtgaatcatcaactttaggagtctcacgaatttgtaaaggtcttgttagttgtaataaattaacccataacgtaccacttgtattggacatacaaacggatatatgattgcctttatactctacaccatgaaacacagtttcatctgtgccttgcgtatcaaaataagccttcgtaataacgcaattagtaggtaaatttaacgtttcttcatccgttaaaagagctaatagatctcgcatattactccttataatttaatcagtataataatagttttataccattactattaaattataatcaacggaaacactatagtcaacctagtatgatatgcgagttaacaacaaaagccaccattgataatcaatggtggcctcaattttatatttaaatacaaagaatatataagctattttataacttcaatccttttaaatattccttaaatgctgcccctaattcttcattccgaagcgcatattccacggtagctttcaaatagcctaatttatcacctgtatcatagcgaacaccttcataggctaaagcgtaagtatctgttttggatgcagctaatgcatctgttagttgtacttcattacctacacctggttttgtattctctaagatatcaaaaatatcaggcgttaaaatatatcgaccaagaacagctaaattggacggtgccttatcaacacttggtttttctactaatccatgaacacgatacaagttatctgccaacggttctccggacacaataccataggagcttaccttttcattcggtacaaattgagcacctaatatgatacctggatgttgttcataacaatccatcaactgttgtaagcatggtttttctggattataaacaatgtcatcacctaataatacagcaaatggatcgtcaccaataaacgctttagcacataatacggcatcacctaaaccacgcggtgatttttgacgaataaaatgaattttaatatccgccaaatcttttaccatggctaattgtttatttttaccttgcttttgtaatagctcttctagctcgacactgctatcaaaatgatcttctatggcgcgtttgctacgacctgttatgataagaatttcttcgataccagaatcgagtgcttcttttacaatatattgaatcgccggtgtatcaacaataggcaacatttcctttggttgtgctttcgtagctggcaaaaaacgtgtaccgaaaccagctgctggaatgacagccttacgaatagacttcatgtgtatgctccttagaaatctttaccaacgaatttgattttccattggttattgttatttttatgagaatctttatatgttaaatacatatcaaaggagtgcaaatcacgatggtatgtgtaatagatagaatccacatcgccactcatcatattttgtttaacactcaccgaaatatcatcgagacgtgtcaatttaaaggaaccaccatagatgagctccttaggaagctctgtactatcaaagcgatatggcgagttattatagttaatattgcgttgattatacgatacccacgcattaactctaggtcctacagctgtacggaattgagcgccccagtacggcatgctacgtatcgacttatcatagccataataatcgcgttgataaccgccgaagaatcgcaaagtaccatctttccaaaggttgataggatcatgagatacttctaccttatagtccttatggaccccctttacagatccttccttccaataaccaatacttgtttcaccacgtgcagtaaatggagatttaccaatatggtacgtatgtgtatcaagacgtaattcgccgattttttctacccatacggtttcatcattatattcattggatactttactatacccgatggatgcagttccccaaggtaagaaatagcgatatccaatttgaggcttaaatccagattttgaataccatttgtaatcaaaatacgcttcaccagatttacccaatggaatttctgcattaccacgcaatccaatgccatcatcactattataaataggacgaggcataatagaaaatgcacttactttaccttgtttatctccacgtatagattttgtataagatttcaagctaaaaagtttaaaattcttgatgtaaaagcttggatgttgaataaccaccttatcgccagggtaaattttaatgtcttcaccttcaatacggtaatcaggtgtatgcttaaatgccatcgcatgcttagatgtaatcatacctttttcgatggaaccggtttgaccatcataggataagttctgccccttcacataatacggatcagaccaaccttgcgtatgaccggcatcaaaatgttggtcactggtacgataggtcataacatcaccagtaagatctttagttttaccgccatcttctaagtagcgatacggaccatcagcagttcgatactctgtggtttttgtattaccagtgatacgattagctagtaatgtgcgattaccttgagtaaccactacattaccaaaagcatttacatcgccagtactaccggaatatgtcatcttatctgcatctacacgagttggtaacttttctgtcggtgcagtaatcggtgaagcaccacgacgaacaacacgaatattgctgcgttcaggtgtcgaaggttgttgcagttcacctggataggattcagatatactatctaaactatcttgatatgtaattgagtctgaagcagcccacgctggctgggctaaacaaagcaagcatgctgccacgagccattgtactctttgtttcctcatggttactaaactcctctattggttacgctttactacgacgattggttgtgaaacattttctgctgtatcatttgtatcttctacttcttctgaatcagcagtgtttgtatcttcttcgtcagtgttcacagttgaatcatctgcttcatccacagtgctatctacggaatcatcattcgcagtcggtactgtcacggcttcagctaattcatcatcactatgagctaacccatcaccaccaataacaagaccttgaatagatacagagtcttgaggttgaataaatacagtggagcctactgggtaatcaatatttttacccttaatgaaagcaccacctactaagccaacagggccaagtagaactgcaccagccacagaggcaccagctgctttaatttcgccctttgttttttccttagcctcattaccttgtacagcagtaaattctgtaccatcaatagcaggaacagattcaaaagttatatctaatgcaccattacgtccaaaagagcgcgcttttttcaaggatgtaatcgttgcagaacctacagtaccagctggcaccaacaatacattgccatccattacattttcagcaacagtgaatttaattgtatctccttcatgacttgtttttgtggataccgcatcatttagtgttaccttgaacacgtgatcagaagatagtgttcctacttgatttgtaagagttacattactaccatataccttggttttcaaactaataatacgtttttgtaatgaacctgttgaaattctaccattcacactacgttccatcttttcaacacgttctaccaaagaaccatcattaatgctgttttggtatgtatattcaagtgcatccatttcttcacgcaatgaaatattagtaccactaccttcaacggaatcatataaagaatctacacgtttactcaatgtagcagtattgccagaaaatccgttgccgtatacagtttcatccaattgattaatacgatccacaacggcaccatcttgaggtgcaccatatacagtgctttctaatacttgtgttttttccgttactgtaccaggagcagcaaatgcggtacctgtcaacaaagatgccatcaaaagtgtaagtacttgcttcttcatataatcctccacaacttatcctctatgggacatatacgttaaacagcacaataagcacgggcctaagaccgtgcttattttctgagtacttctaaggaagtatctcagtggccattaaatttttaaatcaataagtgcagatacacctacaccttgaacacgggaagcgcccactggatttgtactatctactggtactaaacctttaacacgaaccatgccattaaagctaccttcaacttgagcaacagccttaacttgttcgatactagatgcaggtcctgttacttgagcagcaccaatatatccttttgtaccaatactaatgataggtacaacctttgtagtatattcagtactcaaattattttgttttagtaatttatttaagaaagaatcaatttgtggaccaaatttactaactagaatgccaacgccaccaattttagcagcaccaccaaggatactacttaagccgccagcttgagtggttaaaatgccaccaaatgcagttgtagttaaacaaattcctagaacagcggtcataattttctttttcatgataagcctcctaatagatacttatattttaacaaattctatacatagtttctagtgaaagtataaatacttacacttaaagatagtaaaattatataaaaatacaatgagtttattatgaattttatacaatttaatttttagctatgttttaaccgcaaatcatacaattataaccagaagacttaacagattcgaggcacttgatcttcacccaataaatctactagacgaacaccgccaatcgatgtttgtaggcctactttaccaatatttttatccatggttacaccgatatgagtcgcttcacggccttctggataactatgtaaaatatctagcacatcatttgttacagacggctctacaacgaaaatacatttaccttcatttgctaagtataaaggatcataacctaaaatatcgcaaacagaacgaacttcatcatgaataataagcttggattcctcaacctttatgcccacttgactttgttcggcaatttctttaagaacagtacccacaccaccgcgcgtaggatcacgcaatagtgcaacctgagtccctactgcatgtaaaacagcatgaaccatatggttcaatggggcacaatcagtcttaacagagtctgataattctagtccaaatcgttgtcccatgacagctatagagtgatcaccaatagatccggacagaataatatccatattaggttttacgaaattcggacctatatttatgccatctggaatcataccaatgccggctgtattgatataaattttatcaacttcacctttttttacgaccttcgtatcacccgtcacaatttgtacattcgcaagctttgccatatcagacatagtgcttaaaattgtttctaattcgtcgaaaggaaggccttcttctaaaatcaaaccacagctaagatattgtggaacagcgccattcatagctaggtcgttaacggtaccgcatacagctaatttacctatattaccacccgggaaaaaagtgggctgtacaacataagaatctgttgtgaaagccattcgcccagatgatactggaaattgtgccccatcatgtaagggagctaacaaatcattagtaaaatattttaatataaatcgttctgtcaattcgtggctaaaacggccaccattgccatgaactaaacgaactcgttccatttaatcctcccaggctaatccaccactagaaaaaccatacttataccatgcagcacaactaccttctacagataccatacaagcacctactgcatgatccggtgtacaagcttttccaaaaagcggacattcattaggtttgattaaaccttgtaatacgctcccacattgacagcctttaggatcaagagatggtttttctaactgtataggtaacaccttttctgcatctagaaatgcgtaatcatcattaagctgtaacccagaatttggaattataccaataccacgccatgcatcatcacaaacatcgtatatttcattcatcatacgcacagccacaggattgccttccttcataacaacagagtgataggtattacctacttcaaaatgaccacttttccgttgttctaaaatattgacgatagcagataatatttctactccatcaaatccagcaatgcaggatggaatcttatactcatccggtaaaaattgatatggtttttccccaatgataacactgacatgcccaggcaagataaagccatcaatttgtcctacttgtcggtctaataagccgcgtaatgcaggcggaaccaatttatgagacaccaagaataatacatttttcacgccagcctgtgctacagctttcacagtggcaccgatgacagcaatcgtcgtttcaaaccctatagctaaaaatactatatatttatccggatgttttttacttagttccaacacttctaacggcgtatagataacatgaatatgagcaccctgtgtttgaacttcactaagactactataactccctggcacctttagcatatccccaaaggttgcaataataacatcatcacgtttggcatactctagagctttatccatatacacttggtccgttacacacacaggacatccagggccacttactaattctattcccgatggcaataattgtcgtaacccttctctaaaaatagatactgtatgtgtaccacaaacttccataagtcgcacccgttcgccaggtgtatgtagttcgttaatacgatgtaataaagcatcagctgttttctgtttttcctgcaaagtaagcttcttcaagttcttccaactcccggaaggcatctaaggttgccttcgcttcttcttcatctacaatttgaactgcaaaaccggcatgtactaataaccagtctcccacctttgcatctggcacgagaagcaaactacaatcgcgcgttgcacctgttaattctactgtgccaatggcttcattaatagaaattaactgtgctggtactgctaaacacatacgccctccttttgtaaatatacttatacatctatttataactattaatccaaatattttgattaatttaattgtatcacaaaactaagaactcttatgtaaccaatgatacgtttatatatttttttgatgagcaatccacaattgccccaacgataaaccaccatcattacatggtacttttttattaatatataatgtgccatggtgccatttatgttgtaaggaggctaataatctgcgattttgaaaaacgccaccaccgatacatacatcatcgatgccatagcgttcacacaaatcagctccaacttcacaaatagcaatggctaatgttttatggaaactcgccgctaacgaggatacactttcaccttgagaatagccatccataatctgttgaactgcaggcacgagatctaatacttgcccatcatagttaaaatctaacaatcgtccttcttcatttgcacatgcagattctaatgctatggcgatctgtgcatcaaaagagtgttcatttcctaagcccaacaaacaaccaatcacatcaaataatctacctgcactagatgtcatcatcatcgacatgtctgattgcaatgccttatctagaatttgccagcctttaggcaatgtggttaaccatgttttgtatatattaggtaactcttctccataataattccgtaagtaccataaagcttgacgccatggttcttttaccgctttttcaccaccaggcaaaggcgctacatgtatatgggcaacacgcatatactctgcgccataacatagcataaattcgccgccccaaatcgtatcatcgtcaccatacccagtgccatcaaaacaaattccaagaacaggatattttaaatcgtattcagccataacagctgcgatgtgactatgatgatgttggacctctatagccggaagatttagcgttttacttaattgtcgaccataattagaagagaaaaatgatggatgcttatccatgacaattgctttcggcttcacatcaaacagctgttcatatcgttcgatggtccactcaaaagtgttatgagttgattcacttgctaaatcacctatatgaggtcctagcaatacttcctgctttttattaatcgcaaatgtattctttaaatcactacccatggcgagtatcggtagatctgtaatcgactcacaatgaatcggttcaggaatatacccgcgacttcgacgaattaaaataggtgtatcttccaccactgatacaatcgaatcatctacaggcgcataaatttgacgattatgtgtcaaaaaataatctgctatagtctgcaattctgaaaaagctttttcatcatcataaataacggaatcaccgctcgcattaccacttgtcataacccatttcgcatcatgcggtactaacacatgatggataggtgcgtaaggcaacataacaccaatcaagtgattattaggggctactaactcacttatagacgcatgaaaattatcatttttctctaataaaacaataggccttgccatagcgcttaatgcatctaagtctccatcgctaacgacggcaaagtcttctacgatatcaatggaaccggccataatagcaaacggtttatccttgcgatgctttcgctcccgtaatatttgtactgctttatcattagttgcatcacaaaccaagtgatatccaccaattccctttaatgcaataatcgcaccatttgatatcatttctctagcagtttcaaaacagtcatcaacgatacagagattaccattcttatctaatagttggtagctcggtccgcattgttcacaagcatttggttccgcatgatacctacgaccattcacatcaacgtattcttcatggcaagcttcacacatggtgaaatcagacatagtagttcgttctcgatcatagggcatggatttaataatggaatatcgaggtccacaattggtacagttgataaaaggataatcatacctcctaccagattccttcatttcagccaaacaatcatcacaaggtgatgtatcggcactaataaacgtgttgacagtaccatccacaggagactgagcgataacaaattccttatcatcatcatttacagaaggatcgatctttgtaatgctcacatgtgtgatacggcataatcgcggttgttcttcctgaatcgtatcaacaaataattgcaatgtatctatgtcggattgggcctctacatatacaccggaactatcattatatacaaatccactaatccctaattgatgggcccacatagaaacaaggggtcgaaatccgaccccttgtacaatacctgtaaatcgaatcccccaacgttcaatagtttgttttttatccaatctagtgtccatagcggctcctattacaaaatatatcttatttaaaatgtctatcctaatgctataggaatactaccatcgatgccggcttgttcgagttcagcttgaatcatgatagcacattcaattcgtttcttttgtaaacgacagccaaactcataaggtgtttgtaaatctccacccaatgtaatgttattggcatgacagccaccagagcagaagaatttagcccaacattctgcacaggtaggttttgtaaacacatgtgtgttacggaaatcctttggaatttcagtattttttaaaccttcatatacattaccaagtatataaccatctttgcctacaaattggtgacatggataaatatctccatttggcacgacagccatatattcatgaccagccccacagccacgcaaacgttttgccatacaaggtccacggtataagtccatacggaagtggaagaaattaaatttctcaccccacccggccttttgacgttgcaaatatatatctgctaatgtttcatattctttctcaagcgttggccaatcttcttcgcgaagtacataatcgccttcttcaccaactacaggctccatagataagtgttcaaagcctaagtcagacatagccaatacatctttagtaaaatcaagattcttatgcgtatatgtaccgcgtacataatattctaaaccatgacgttgctttacagcatttacaagatttttagcaatatactcataagagttagctccactgccagcgactgggcgcatagcattatgcacatcttctcggccatctagagacaagaccaagctcattttatgttcgtttacataatcgattttctcttgagacaataacataccattagtagtcaacgtcaatttaaagattttattatgttttggcgcctcttgctcgatatattctacagtttgtttcaccacgtcccaattaagaaggggttcaccaccgaagaaatcgatttcgcaatgttgacgagtgccactcatttgaatgagaaaatcaacagcacgtttagctacatcaaagctcatcaattcgcgttttacaccgccgtaatcgccttgactagcaaaacaatatttacatgctaaattacagtcatgggcaatattaagacacaatgctttaacgattggtttttccccaactacaagcttgaattcggtgctcataggagcaaagagttgttctgcagcgatgagctcatctaattcatccatgatttcatttaattctacaggattctgagagctatctaatgctgtatggactgcatcacgattggtgccgtcatatatatctaatactttatcaatgagttcatcaataacgtgaatgataccgctatttacatctaaacaatagtagttatctttcatccgaaacttatggatcattggttttaattctaacatggtacctccaaattatgtgtatgtgaaagcgctaaactatatagaactttctagataattgtaccacattttttgtctatcgtgctaaaagtcctcataaatatataccataaacagtatgtatatattacatacataaaaaaagagagccatcggctctctttttattatttttgtttgcaaacttggttgcctactgtacagcttgttttgcaagcggattggcaagaagtttggcattcaccacaaccgccagttttagcagttttttgtaaagattcagtgttgattgtacgaatacgtttagccatgattatcctcctcaatacttattgtattactgttattttatcatagatattcaaactatgtaaaatataaattatttttgtacatccttacgcaatgcttttcgcaacgccaatgcaatcggtgttacgataacgcctgcaaagatggcttctggaataccatgagtaacagacaatactaaaatagttcccataacttgatcagatgaaagatgcattgcctgtgcgaacatatccgcgtatatcacatagattagccccattaccatacatgtatggaatatagtgcccataaatgcagaaactatcaagcgcggaccttgtggtaccttccataatgctttgtataccaaaacagccaatacagggaatataatccgaggtaatactgatactaacggattaataaacagtggtgacaaaatatttggtgccgtaaaattttgccagaagctatagacaccaaaaatcaatcctacgaacgcaccaaccttaggcccttcaactaaggcaccaattaatgctgggacatgtaatgtagtgacattcaatggtcctaacgccataataccatagccagaaagacctagaataatggtaatggccgctaatagacccacaatggttaattcgcgcaatgttaagcccgatttcgtaacggtttccttactctgtttacgatccaattgtgtcgcttgttgttcttggattgatacctgttggttaccatccttcacattttcattcataaaaatcctcctccgctctcattctcttaggatataagtcgaaactagaaataaaattaacctttgctcttagtaagagcttttattacacctatctctactaatttaccaattaatacagatacgataataaacacaaattccagtaatcctggtgtaaagaatacaagtggattgccttgatagattggaaataccgtaggtgctattgctttcacaaattccggaatatacccaccatataatatatgaccattcatagctaatagcatagcagcagtaacgacaatacgcaataatctcgtccctttatattcaccatttcgagggtacatatagaatgcaaagactaacatcgaaatgatgatgaataggaattcccccaccaaagcattcaaactaatggtagggccaaaataagctaccatgataggatccgttaaattgatgtaaaaaatagaacctaaatagataaatggaattggtacaatataaacggccatatctaaagcttcatcaaccgcaccccatctatggcgacgtttgaagaaaaatgtcatcaataaagctaccaactcaagcaaaatctgtataaaaaaatatacacctaaaaagactagtactataagcgcttgattttccaatgttacattgaacggcgtagtgaatagattaataaccgtaaaaatggcccaactgtatacatggtaccccatatgaagtggcaattcaccaaattgtccttgtcgcatccgttgtaagagaacaggtaccaatagagataaaacggggaatgtgagatatggagatcccaaaccggtttgatgtaatacagcagtcactacacttacaaaaaaggcactaactaaagtaaatacaataaattgcttattcatgtgaacctcccaacaattgagaaattaaataagctatgatgagaacaatagtaacttgaccatacataccgacaaggaagataatatcacgcccaacggatggcaagccccaaagccaatttaaatccaacccaagaaacattagcttataggtagcaaactgaataacggcccaacccagcacatatataatgcggttaatccgtttgttttcagcgccaaatgtactagctttaaacgataaataggcccaagggatacacaaggatagcaataaataccatgccaatgccactgtagcactagatccattatgaatcatataagaaataacaggaatggccacgataaatatattcatatatagtgatcgtttacaaatatctaatatagtgttcatatacgttctcctaagataattaatcacttgatattgtacactacacaccagtaaaatgccacaaaaaaagacctcttatagaaattttctataagaggtcttttaataaaatccatgtgcgaaacacgaaacaatcaagtattatgcaacagtagattctgcagtaatatcaattgtatgtttgtcttcagatttttcttctttcaacaatggagtcatgctttcaataccaatacccaatgtgaataggttatgtaaccaagcagtttgacttggaggcatgaaaccaagtacgccaccacctacaagagcaccattaaaaccaacaatgccattgtaattggacttgatgcgtttcatcaaggccatagaaatgcggcgtaaatctacaagagcttgtagattatcagaagaaatcgtaacattcgcaattttttgtgcaataggagcaccttcattcattgcgatgcctacatgtgcttcagaaatagctggggaatcattgataccatcccctaccatcatgacagtataaccttcagcttttgcttgttttacataagctgctttatcctctggcaatacctctgcatgcacttcatcgataccgagttcatcagctacgcgttgcgcattgcgtttggagtcaccagtcatcatgacaatctttttaatgcctaaagcatgtaaatcagcaataacttgtttagattcatcgcgtacagggtctttaatacaaataaccgctgctagtgtacctccaatagcgaggtaaatatgggaagatgaatttggtaaattattgaacttttcttgttcatctgcaggaatctttgttttttcatcatcaaagatgtagtgagcactaccaatgcgtacacgatagcggccaactttagatgcaataccatgagctacaacgtattctacgtcggagtgcatttccttgtgaggcaaggaatgatccttagcagcacgtacaattgcttttgccatggaatgagggaaatgttcctcaatacatgcagctaattttaacatttcatctgcatcatgaccattaaatggaatgatttgttcaaactcaggttctgcttttgtaagagtaccagttttatcgaacacaatcatatctgcttgtgcaatttgttctaagaacttaccacctttaacagtgataccgcgtttagatgcttcttgcatagcggaaagtactgccaatggaatggataattttagagcacaagagaagtcaaccataacgaaagacaatgctttcattacatttcgagtcaacaaatatgttaaaccagcaccgataaagctaataggcactaatttatcagccatgcgatatgcttgttgttccataccggatttcatttgttcagactcttcaatgaggttaacgattttttcgtaacgagaagatttagatgtgctacgtacttctacaatagctttaccgtcttcaacaacagtacctgcatatacagaactgtcttgatcgcgacgaactgcttctggttcaccagtcatggagctttcatttacaagaacaacaccatcgattacagtgccatccaatggaattacttcaccttgacggataatgattttatcgccttccacaacttcgttaacaggcttgctcacttcaatgtcatcaactaaaacccatactttatcaacattcaaagacatgctttgagcgagattcaatacggatttacggtgagtccattcttctaagatatcgccaatacctaataggtacataacagcaccagctgtaggataatctttttgaagtaaagctgcaccaatagcaacaccgtcgagaacctctacggttaacttacgttgccacaatgttttaatcgctttgccgataaatttaataccgtcaaaccatgcccatgctgccgcaatcggtgcaggtaacactgcttttttacctaagtaaatagcagtacgattaatcatcatttcacgatattttttatttaccaagcgcggagagtattcattcaaagcaggagcttcggataaatctaaatcgcgtagacctaacaccgcatcacgtacagattcagaatcgccagtatgtttaatgacgatctgactgctacgtgtatagaaggttacgtctaaaattgcatcattaagtaataatgtatcttctacataagctgcttcagcttctgtaaagcgatgacctgttaccttaacatgcaagcgatttctgagttttcgtacaacagaaaattgtaacatagttaaatccttctattatttattttcttcaaagatttcttcgttgcgtgcttcgttgatttcttgagcttctgccaatacatcagatgcggaagcttgtactttttcagcagtttccaatacagtttctttagcgcgaaggccagctgctacgataccagcatatacttttttagcgtctttagaagtcaacactttaagacctacagtacccaatgcaagacctgctgcgaataagttagcgtttttaagattgttttgattgaagttgaacatgataatatccctttctactaaatatataaaaatttacttactatatttgaaaagaggagccattatagagacccctctttcaaattcagaattcgtattagcttacttagcggtacgtttaatgcctagtgctttattggaaccatcacagctgcagttaccaccgcaactagaagattttttggagccaccgctaccacagccgcagccacctttaccagacacttgtttataaatttttgtaccaagataagccaacgctaatatcactatgagtcctataattaggttatccattataattccttctttctcaatatccaccaaattttcataaattgatatatgataaatgagttaaaagcaatacatttggatatttcccttttctcattatcatttaaccacaaataatgataattggcaagaattatttttaattttttctataattaaattacattatatcaatacaatttagttctaggtatctaaggaatgtaaaccatagtgattagctacgctttaattagaagcctagtgccaaaccgatattgtagaaaataaagcatgcaatccatgcgaaagcattttcatagcagaacatgaataacatccatttccaagaaccagtttcgcgtttaataactgctagcgctgcgatacatggagggtaaatcaagatgaatagcattaatgttaatgcaatcaatggtgtaaagtgtggatcattttgtaagtaatcagtcaatgcttgaggatgatctgtatcgccacctactgcatagatagtacccaatgtagatacaacaacttctttagctgctaaaccagccacaagagatacaccgattttccagtcaaagcctaatggtttaagaactgggttgattgctttaccgaacatagcagcataggattgttccaatttttcagaattttgtgcttcgtcaattttttgattttcatcatctaaattaacgctatttttgtacatagcccatgctactgggaataattgttcattttgttctttaatgtcattgaacaattcaggtgcttcagaatcatcttctacttcgatttcaggagcagcttctccagcatcctctgcttgtgtagtagcatctgctacagtagatttcatattatctacgatttcattaacttggtctttttgttcatctgtagcgataccaaaatgagccaaagtttctgcatctttcatttcatatgtttgagctacttgatcatgcaatgcatcataatctttggagtattctacatccattggatatgttgtgatgaaccatacgaggatggaagcagcaaggatgaaagtacctgcttttttaagatacataataccacgttcaaacatatgagttaatgtagcttttaaagttggtaaatgatatggaggcaattccattacgaatggttctgcttcgccagcaaataaatatttgcggaaaattttagcaaatacgataccaaatacaatacctaatgcatacacagcaaatactacagtaccagcccattcaggagggaaaaatgctgctgcaaacaaagtataaacaggtaagcgtgcagaacaactcatgaatggagtaattaagattgttaccatacgatctttgtagttatcaagtatacgtgcacccattacggatggtacggaacaaccaaaacctaataataaaggaataaacgatttaccatgtaaaccacaagcgcgcattacacggtcaataacgaaggcagcacgtgccatataccctgtatcttccaagaaagagataccaaggaataataatagaattaatggtacgaaggataatacagcacctacaccggcgatgataccgtcagaaataagtgattgtaactgaccttctggaataactgttataacccatgcttgtaatgcagtaaagccatcttcaatccaaccttgaggaatagcacctacagtatttacgaagttaaatagtaaccacattacaaccataaaaattggcaaaccaagaatacggtgagttaaaattttatcataacggtcagaacgcgtttctaattgtgtaggagcctgtgttaaacatgtattatatacttctactgcgaagcggtgacgacattcttggaatattacatcaagatcgacttgatctttgatttcttcacgaatcgctttcgctttttcaataacagcttctgtattttcaaagcgcataactttgccaataacatccgcatctttttctaacaacttaacagcaacccaacgaagtggatatgtaacagtaccagcttgttttagttcttctacaagttcactaattttgccttctaacaaatcaccatagttaattgttacaccaggagctttttgagaagcagctacactaactgttgcttctaacaactcatttgtaccaatgtttgtacgacctactgtgctaacaatagtagcccctgtcatttctgccattttttttaggtcgtatttgatgcccatatcttcagcaacatcagacatgtttagagcaataaccattggcttttcaagttccaataattgtgcagctaaatataagttacgttccaaattagatgcatcaagaacattaacaattacatctgggttatcatttacgataacattacgcgctactaactcatccaaggaacgtgcagttaagctatatgtacctggtaagtcaataaacaataactcatggccatcaaatttcttatagccttcctttttttctactgtaacgccggcatagttaccaacgtgttgcttcgcccctgtgatattgttaaacattgtagttttaccacagttagggttacctgctaaggcaattcgaatttgccctttttctgccatgcgaacctcctattgaacctctacatcaatcatgccagcttcgctattacgaagtgctaattcaaagttttttactttgatttccaccggatcccccaaaggggcaaacttcataacatggatttttgtaccatgtacaagacccatgtcaattagacgatgcttaacgttgccactgccatgtagtgtaacaataagaccagactcacctggtttcatgtcttttaactttttgatagccatacgacacctcctaattattgtacctaacaacctcatattaaacacaccaaataataatgcgtattaatatcttaaattattatatcatgaaagttcataatttcaacaataattatcattttgttattcaaaatatttatatttattattaaatatgattatacctattttaaaaacataccaaacgtacttataaaataagggtctatccattttaatattatatacacaataagatttctcattaccgaaaatgataattaaggttatcttgttatcaatttattatatattcattctcattttcatacttgcgtttcaagaattgcttgtcattattaagacttctaatctcaatttcacctatcaaattctcattttctaaattttattcatttaattagttgttattcaacactcattattctccctagaatattctataatgatataaatttgctccactctaatagattgggtataattaatataatatgtattaaagaaaggacgacacatgaaatcttttaaatccttaggcgtttgcgacgaacttattagcaccttacaaaaacaaggcatcaaggaaccaacgccgattcaagaacaatcgattcctatcgtcttcaaaggcaatgatattattgcaaaggcacaaacaggaacaggaaaaacattagccttcttattgcctatattgcaacgcattcacacagatgtacatcaagaacaagtactgattatcgcaccaacacgggaactcattaaacaaatttccgacgaagcaaaggtactaggcgctgtgttggatgtcgatattcttccgctcatcggtggtaaaacgattgaatcccaattacaacaacttggtagacgtcctcacgttatcctaggtacaccaggtcgtttattggaccacgctaagcgcggctccctccatctcgattcaatccgtcgcgtagtattagatgaagcggatcaaatgcttcacatgggatttttaccagacatagaaaacctaatcggtcaaacagatgcgaatcgacaattgttactcttctctgctacaattccggacaagatacgcaacctagcaaaagcatatatgacaaaaccggtatctgtaacggcggaaggtaaacacattacactagactcaattgaccaacgcgtatatatgatgaatccagaggataaaacacctcgcctcatcaagatgatccaagaagataatccatatttggcaatcgtgttctgtaacaagcgagaaggcgccattcgactatcctacgagttgacagctgcaggtctcaacattgctgaaatgcacggcgacctaacacagggccgacgcacacaaatacttcgagactttgccaaggcaaaaacacaaattttggtggctactgatattgcagcgcgcggcatcgatattgagggcatcactcatgtatacaactatgatgtacctcatgatgtagattactacatccatcgtatcggtcgtacaggtcgtgcaggtaattctggtatagccgttacatttgctacgccagccgatgaatcttggttacgacgcatagaacgtgcgatccaagcaaccttaacaaaatacacaaaagatgggcaaatcaaaactaaaggtaatgccagcactgcgccaaaacgcaaaaaaacaacatcaaaacctaaaatcacaagttcctatcaatctacaaaagcaaaagcccataaggctcgaggccataagggttccaatactcgacaacgccgtgcctctacatcacaaacaggtcgacgtggcaatcgaagataacacaaaaatgcgtgtagcatatcataagctacacgcattttttatgtgccattatttattttgatttgcatagatactcggtacgccctctacatccatgcactgtgtcttgcaagctaaacgattactacaaacccatgtagtgcgacctctcatctgttgctttacaaaatatccttttttgcatcgagggcatatatattgctttgactcttccggaacctccagatttgaatcctcgttttgaccaccacctacaggttgagtatatcgacaagacggataattagtgcaacctaaaaaggcgccaaacttaccactccgctgttgtaatcgccccttcttacaggatggacactcgggtaaatccttcagatttacttgattggcatccataggccgtcttgcattttgattcgaaatggtacggaccacatttggcatcatttgatcacgactcacctgtttatcaaaaccaagtttatcaattaagtgttgtaaaaattgaatctgatctttcaggaatgactccagtgtatcctcaccctcactcataagggcaagacgttcctcccaaatggctgtttcatcaggatataataattcatcaggcaatgcatctaccaaaagatatcccgtatcggtaggcgataacacctgtttcttaccagatgtcttcataaacccacgactgattaattcatcaataatatttgcccgcgtcgcttccgttccgataccggatacagccttcaattgtttcttcaactcttcattcttaacaaacttatgaatttccttcatcgcttgtaataatgtagaaggcgtaaatcgagatggcggttttgtttgttttgactctacagctgaatccgtatattgaactgagtcattctttttaaccgacggcaaatgatctgcttcttcgatagcatcctttttaggccccgattctgcacctcgttcatcggttaagtccggttcatcaccatctgcgttagtcttagacttttgacgcttatataaggacttccagccttcttcaataacaacgcgaccattggcaacgaattcttcctcgcattgaccaactacaatccttgtttgctcatatacatgttctccataaaattgagccatataggcctgactgatgagaaagtaaatattacgttctgcttgagttaggctgtttatattacaagcaactgtagttggaatgatggcatgatgggcagtaatctttttttcattccatgcacgactcttaatatttctatccgcattttgtgcccattgtgaaagtttttcatcccccgattgcgctaaattgctgagaatagccatgcgatcgccatattgattaggtggcaagtattcacaatcagaacgaggatacgtggtcaattttttctcgtataatttctgtgccgtatcaagtacagtttgagggtcataagagtatgccttccctgccaacacttgtaatgacgatagtgataacggcaaccgttgtaaatctttcttcttggattttgtaacggattttaccacaccatcagggcttgatgctagctgttgcactaagctttcagcaacccctttattaatgagacgcccatctggatctaatcctttttgttcatccttaggttgccacgttgcccaaaaggtaccattctcatgggtatataaaattttaacggtaaaataatcaaccggtttaaagtcggctaattctcgttcacgacgtaccacgagtgctagtgtcggtgtttttacacggcctataggcaatgttaccttattccccttataccgttcagataatgtataagcccgagataaattcatcccgattaaccaatctgcacgcgctctagctaatgcagattgatatagattgtgaaaatccttattatcccgcaaatcacctaatgccgattttacagatttctcgtccaatgcatttaataaaatccgttgcaccggttttgtattgcctacaaaatacaaaacctcatcgaccaataactgaccttctctatccgggtctcccgcgttgacgatgatatcagcttttccaatcagctcttttacagtttcaaactgttgacgactactatcggttacgagtaatttccactcaataggtacgattggtaaatcttgagggcgccagcggatatacttatcgtcatagtcaccaggctccgcttgatgtaatacatgccctacaacccatgtaacaacatcgtcaccttggataaaataaccattgcgtttttgtatattcttattttccggcaaacatttactgatttctcgagccatggatggcttttctgcaataaataaccgcatggtcccctccttaacgtacatatggcgaccatccccgtagtcgctctttgaaatctcattatactacaatttagtggtcataactaccaaaatcatgtataattttaaagatatgaatgatgtggaaattgtacaatacaattaaactttcacaagcgaaacaacagaggtgaattatgacatttttagaagaagtacaacgtcgtcgtacgtttgctatcatatctcacccggatgcgggtaaaacgacactaacagaaaaattacttttatacggtggtgccattcacttagcggggtccgttaaatctcgtaaaacggcaaaacacgctgtatctgactggatggaaatcgaaaagcaacgtggtatctctgtaacgagttccgtattgcaattcgactacgatggatgtcgcgtaaacatcctcgatacacctggtcaccaagacttctccgaagatacctatcgtacattgatggccgccgatagtgcagttatgcttatcgacgtagcaaaaggcgtggaagcacaaactaaaaaactatttgccgtttctaaagaacgaggtattccgatttttacattcgtaaataaaattgaccattttggtcgtagtccattcgatttgatggaagaaatcgaaaacgttctcggcatccgtacatgccctatgaactggcctattggtatcaacggcgaatacaagggcgtatacgatagagaacatgaaacgatcgagctctttgctaaggatgaaacacatggtcaagaaaagttagcctctgaaaaaggtgcattaactgaccctcgcatgaaagaattattaggtgacgatgtatatcaagcattgcttgatgatatcgaattattagacgttgcaggcgacccattcgattttgataaggtgcgcgctggcgaattgacaccgatgttcttcggctccgccatgacaaactttggggtaaaaccattcttagaaaaattcttggaactcgctccatcccctgcgccacgtcaagctatcgaagaggttgtacaacctacaagtgaagatttctcggcattagtatttaaaattcaagccaatatggaccctaatcaccatgatcgcatcgtatttatgcgtatctgctctggtaaatttgaaaaaggcatgtccgtattgcatcgccaatcgaataagacgattcgcttatcacaaccacaacaattcttggctacagaacgtaccattgtagaagatgcgtatcctggcgatattatcggtgtcttcgacgccggcacaatgggtgtaggcgatacactgtgtgcacaaaagcacaaggttacatttggcgacttccctgtcttcccacctgaattctttgctcgtgtatctccaaaagatacgatgaaacgcaaacaattccaaaaaggcatgacacaacttgcccaagaaggggctgttcaaatctttgaacaaccaggtgctcttgactccttcgtagttggcgctgtcggtatgcttcaatttgaagtattggaataccgcctaaaaaatgaatacggtgtcgatttattaaatcatacattgccatacagtgtggcacgctggattgacggagacgtagatacatccacactaaaaggtctagataatgcaatgatcgtaaaggataaccgtgaccgcaccgttgtactcatcgccaacgaatggcaaatgggttgggttctagagcgtaatcctgatgttactttcttaacaacaccaaaactacataatgagatttaattaaatcttagttcactatataaatggcgaaggccctttctatcgagccttcgccattttattctcacatttatacaatcaaaaatttttctattctcattagaggaatttataaggaagacgtagaatatataatctatacatattttgtatacatgataaattctatagtatttaattggttgttcatgatacaatgtaataaattatttttatttgttaaaaggagtgattttatgccactgattgacctaaagttagtcaacgatgtatggacactaaacctgtccatgattcaaactgtgggcctcgctgtaattaccttattcataggtacttggattaataaacattccaagtttttacaacgcatgtgtatgccagcaccagctgtaggggctttaccatttgcatttttaactgccattctttcttattatcatattttggatattaagttcgaaccttccttgcagcaattcttaatgcttgccttctttactaccatcggtttgatggcttccttaaaagtattaaaaaagggcggcattttcattgttttcttcttccttgcttgcgccgtgtggattgtagttcaaaatactgcaggtatcgccattgccaaagcattgggtattgacccaattatcggtatcatggccggttccgtatccatgattggtggtctcggtacggcaggtgccttcggtccatactatgaagaactatatggtgtcgcaggaacagcatccgcagcggtagcagcagctacattcggtatggtagctggtacaatcttaggtgctccagtaggtgaacgcatcatcaagatgcacaaggtaaaaacaccttatgacaaccctgaaactatggatgatgacaacatcgattatatcgaagatcacgttgaaggcggcggaaagcaatttaactctcaagatttgttaacgatttgtatgtggattggcctggctcttggcattggtaccattataagtgcaggtttatctatccttacaccattgcctgcatacatcggctctatgatttgtgcagccatcattcgtaattatggtgattttacaaaatcctacaaaattaacgatgctgctctcgacgctgtttctaatgtagcattatccttattcgttacaatggcaatcaacagcttgaagcttgtacaattaatcgatcttgccttgccgcttattacaatcttagttgtacaaatggcgcttatctgtgtgtttgcatacctcatttatctcctatttggacgcaactacgattctgttatgctcggtgctggcgccatcggcttcggcttaggtgctacgccaaatgcattggttaacatgttatccttagcaggtaaacacggtccatcccctcgtgcatggctcgtagtttccttggtaggtgcattcttaatcgattttgctaatgccttccttattacaacaatggcaaagttaatacactaaaacgaaaggacccattcgggtccttttcttatgccaaaaggtcctaaggagaatccttaggaccttttaattatattatttaattaaggccgcccacgcattggctacatcggcaaattcttggagggtaaatgtctctcctcttcgttgaccatcgatattggcttttgctaaaagctcttcgattctatccttggatagacctgtagtcttcatcgtattagcaaaggttttgcgtcgttgtgcaaaaccggctttcacaacgcggaagaatagtttctcatcaactacatccacaggtggctggtcacgcaatacacagcgaatgacagaactcgtgacagctggcgctggcaagaaagattttggcggaacatctaacacgatatcgggcttagtataatactgaacagccaccgatagagcaccgtagtccttcgtacctggctttgccaccatccgtaaggctacttctttttgtaccatcacaacgaggcgctctataggcaatctactttccaaaagagacataatgataggcgttgtaatgtaatatggcaaattagcaacaaccttgaacggttcatgattcatgatggacggcacgtctaatttcaacacatcaccatgaacaatattcacattactatattgagccagcgtcgtatctaacacctctaataaacgtgtatcaagctcaatagcctttacattagcaccactttgtgctaaaccttgtgtaagcgtgccaataccaggaccaatttctaaaacaggctctccttcttgtaaatccgcagcttttacaatttcatcaacaatgccacgcttaatcagaaaattctggcccaactttttgctcattttaatatcaaaacgtttacagatataatgaactacttctggactcgcaatgatagattcaatcatgaatactcctattctaaattttgttacgaatttaatactatgtttgttgaaagtatattaacatcttgaaacggcttgttcatattcatcacgactgatgccataatgattgagtcgatataaaaactgtttgccatttccatatcctatacccaaagcagcaccaacggcagctcgtttatcagcactattaggaaatccagaaaggccatgtcgtacaagatctgccatcgtaaattcctcgctggataccaatgattctgtatggagtacggataaagcctttataatagactctggcgaagcttgttcgatgccaatatcatcatttgcataggcctcatcgcgaggaacaaaggcatgttgtgcattaggaaatttctttgttaatacgcgacgtatacgttcgccagccgtatctggatcggtaagaataataatgccccgcttctcataggctacgcgaatctgttcaataacgcccttgcgcaaggtaaatccttccgtagcaatacaatcagcgtcaatagcttgatgtatacgttgtatatccgattttccttctactacaataacctcttttaacataggacctccttatatctattatattattgtaacatatatagcattgcttaaataggtgtaatagtttagtataatattatataaatctataaaataaggagataattgtgacattacaacaattgcgatatgtaacgacaattgccaatatcggcagtattagtgaggctgcaaaacgtttattcgtatctcagccaagcttgacgaaagccataaaagaattagaaaaggagatgggcattaccatcttcgatcgcaccaataagggcattactgtatctaaggagggcgagcgttttttaggatatgcacgccaagtattggaacaagctacgctgttagaagaacaatataagagtaataaaggtggaaaaaaacaattttccgtatctacacaacattactcctttgctgtaaatgctttcatcgatcttatcaatcaaagcgatgtagactcttatgatttctcgttacgggaaacacaaacctatgaaatcattgatgacgtagcgcatatgaaaagcgaaatcggtcttttatattacaatgattttaatcgacctgttttagaaaaattgattcatactaacgaattaacctttacagagctattcacggctagccctcatatttttatcggcaaacaacatccattagctactaaaaaaatggtctccatgaatgaattggaaccatatccttatgtatcatttgaacaaggcgaccataattcgttctatttttccgaagaaatttttagtactgttgtgcgcccaaaacatatacgcgtccgtgatagggcctccctctttagtctattaatcggcctcaatggatacaccgtatcaagcggcgttatcgataaggagttcaatggtgaaagtatcatttccgtgccactagcagaagaaggcatcatgcatatcggctacattactaacaataaaatgcaacgtagtcgtttaggacaaggatatattaatgccttagagcaatatgtaaacaattatggcaaacatattcaattgcccacagaaaaataaatctttcgattctacaaatcaaaattaataaactaaatcagtacatcctctatacagaaggatgtactttttctttataactaatgccatactatatggttgcctccataactctaatctataccaaacattaacatatagatatttttaaatatagttagacttagctataataaacctatcgaaattatcggttataccgtttattataggaggttttattatgtctaaccatttagcaccatttcattttgatattgtaggttctttcctacgtccagcagaattaaaagaagcacgtcaagctttcacagatggaaaaatcagtcgtgaagatttaacagccgtcgaagatcgccttattacagaccttatcaaaaaacaaaaagcagcaggtctacctgtgattacagatggcgagttccgccgcgcatattggcatttagatttcatgtggggattcaatggtgtaaaagaaattgaacttgaacatggctacaaattccacggccaagaaacagcaccaggttctcttgcacttacaggtaaaattacaggcactaatcacccattcgtagaacattttaaattcgtaaaacaattcgaagatgaacatacaacagctcgtcaaaccatccctgccccatctcaattcttagcagaattatttcgagaagataatggtactgtaacacgttccttctacccagatttagaggagttaatccaagatattgcagcagcctatcgtcaagttataaaagatttatatgatgcaggttgtcgcaacattcaatttgatgattgtacatggggtatgtgctgcgaccatggctattggactggccggcaaaaagataaaagtgtaaccatcgaaggagaaacagcaaaatacttacgcgtaaataacttggctcttgaaggtcgtcctcaggatctagcttttacaacacatgtatgccgcggtaattacaactctacttgggctgctagcggcggctatgaaccagtagcaccaattctatttgccaaagaaaacgtagatgcatattacttagaattcgatgacgaacggtccggtggctttgaaccattgcgtgaagtatcacctaataaaaaggttgtattaggcctcattacaacaaaacgtccacaactagaaaataaagaggtgattaaggctcgcattaaggaagctacgaaatacattcctctcgaaagactttgcctatcccctcaatgcggatttgcatcctgtgaaatcggcaatcaattaacagaagaagaacaatgggctaaattggcattagttaaagaaatcgcacacgaaatatggggtgattaaatgacagagcgcacaatatacttaggtggtggttgtttctggggattacaaggttatattcgccaaattcctggtatagtatcgactgaggtaggctatgccaacggccctactaccaacccaagttatgaagatgtatgtcatgacagtggccatgtagaagcactaaaagtaatctatgataccgatatattatcattagatcatttaattcagtatttcttgcgtgctatcgatccatttagtatcaataaacaaggcggggatgaaggaattcagtatcggacaggtatatactatacagatagtgctgataaagcaattatcgagactacattagcacgtgctcaatcctttgaaagcaagcccttcgccatcgaagtattaccactcgataactattactctgcagaagaatatcatcaagattatttagacaaaaaccctaatggttattgtcacattcctctcggcctatcccaagagccacttatagacgatagtgcctataacaaaccgaccgaaaaagacttgcaaattttatcaccgcaagagtttgaagtaactcaaaatgctgctacagatgcaccatttagtcatgaattgactgatgagtttaaatccggactctatgtagatattacaacgggtgaaccactattcggatcatcgcgtaaattcgaatcacattgtggttggccaagttttacaaaaccaatagcaaaggatgttattcgatattacaaagataactcacacggtatgcagcgtattgaagtgcgtagtcgaatcggtaatgcccacttaggtcatgtctttgaagatggacctaatggatcattacgttattgtatcaatggatctgcgctcaaatttatacctaaaaatgaattattaggaacaaagtatgaatacctaattccttatatcgactaatatctatacaataaaaggacgatacatttcctcgttggaaactatcgtccttttctcattaggttaattatacaaaaaggagatatcacttggatatctccatttattattaatatgaattaatcgagtacgtaaactgttacatcacgtcgaccaaagtccatggcttcaccataggagtccataacaaggtcaatacgattccctacgatagcaccgcctgtatcagctgctacagcctcaccatagcctggaataaataagcgcgtacctaatggaatcacatcagggtcaacagcaactacaccgcgtactgcaggaatgcctgtagcagtaataccagcaccgtcgccatcacctgctaaataagcagatgcttccataacgatggaacgagatgcacggccagatacattacgggatgtcgttacttcacgagtaccttctttaataattgtaggtaccatatttgtcattacagacttagacaattcattcgttctaatagcggtgccattattatataatgtctcaacctgaacgcgttcagtgcccggttgaccaacttgaacaacttcttcttcaccttgagccattgtgtcatctttttgacgaataacttgaactgggatttcttgatccacagtattcactgcacggcttgtaacacgtacaatattcacagtactaccagcttgaatagcaccactagctgcagtggtataattaggagctttaaagcctaattcttctgctaagtcctctgctgtagtttgtgtagtataaacagttctagtttttccatttactgtaacagatactgggaatgctcttactactgtaagtgttgtcccttcttgtacagaattagaatcgctaattactttatctttcggatttaatttaatacctgcgttacgcacgataccttcattcgaatttaaatgtgttttaacagtatgagctgcaccatcagccatgactgtaacagttttatcgttgtaagaaaaaccagtcaaggttattgcagttaccatcaatccagcaaccacagacgatatatatcgcttgtgcgtcttttgaattctcattacgaaatacctcctgtaacaatcatattctactacagttagatataacctgtcaaacgcataaggttaacaatcgtcgataaagctttataatatatggtttttattatttttaatcttttgtttttttacactttgtccactgtataaatacatatctagatttttcgataacatactacataagcaaaattgtggaggtatataagatactactacaatatatagtatacgatgtatatattatttataaagtgaatatttatgagtttttctattgttaccacaaaatatattaaagttctaaattttcatttacatttcatattacaataaataaaacgactaaaacatacgtaaattgggtatttataatctatatttatacatctatataacagcgttttgaaatttcattattctttcatcttaaacattggcttaaatcgttctatgactgtcatttgctccctactatcttgtgtattagcagcctccattaattcttcttgtgcagataacggcccctctatattagatactttataataagaaccatcggatctcataagatgtgcttttaatgtatctactaaatataagtctagaatacctttaattcttgctttatgacgtttatcctcaataggaatcatcaattcaacccgttcatttaaattacgaggcatccagtccgcactagaaagaaatattttttcattgcctccatttcggaaatagaacaatctatgatgttccaagaaacgccctactattgaacgtaccgtaatattatcactaacccctgcaatgccaggtctaagagtacaaatcccccgtacaatcaaatcaatacgcaccccattagcagaggcctcatataatttggcaatgacttttttatccagtaaggaattcatttttgcaataatatatgcatcttcaccacgtttagcacattgaatctcttcatctataagatccataattctctctctcaaatttaatggtgctacgataaacttattccaaatcggtggatccgaataacctgaaattagattgaagaagcgagatgcatcatcaccatattcatcattgcatgtaaaaataccacaatccgtatatatacgcgccgttttaccattataattccccgttgctaaatgcacataacggcgtataccatcttcttcacggcgaactaccattgtaatcttagaatgggtttttaacccctttaatccataaataacatgacaacccgccttttctaatctacgagccatagtaatattatgctcttcatcaaaacgggcctttacttccatcaaaacagtaacttgcttaccattatccgctgcttttataagagacgcaataatgggtgattctccactaacgcgatacaaggtttgttttatagccaagacatttggatctaccgcagcttgtgctacaaattgttcaaccacactaaaggattcaaaaggatgatgtacaaatatatctctattacgaatcacatcgagtaaattttctccttcgaatccaattaaatcgcttggtattttaggctcaaatggtttatagcgcaaattatcatacccagggtaatttgaaaaatcgaaatacatacgacaatctaaatgaccatctatatggtatacatctttttcttcaagttctacacttgccaatacggtacgcaacaattcaggagaaccagctccaacaacctctaagcgaaccgcatcaccacggcgtctacgccgtaaagaagcttcgacctctgtcaatagatcctttgcatcttcttcatcgatttccaaatctgcatcacgagtcaatcggaaaatcatagactcttcaataccataaccttggaagaattgaatcgcataataacttataacatcctctaaatacacaaatcgatgtaccttatttgaggaggagggtacctcgataattcgatctaatactgatggtattggcaaaattgcaattttataatcctttgtaccatcaggttggacttgaaagatgcgaacaatagcattaatcgtattattagctaaaaaaggaaatggatgtcctgagtcaacggccaatggagtgaccacaggatagatttgttcctcaaaataatgacgtaaccaggcctttgtctttacatctaactcttcaggatgaaaaaaactaaaccctttttcctttaaatctgctaaaacgcgatgtaaataggtatactgtaacgaaactaaacgttgtacagactcatcgatagctttaagctgtgccttggcatccatatgagcagcatcatatttaacaataccattcatagcttgatgacgtaatcccgctacgcgtatcataaaaaattcgtctaaattagaactggcaatagcgataaagcgtaaacgctccattaagggattgctcgtatccatcgcttctaatacaacccgttggttaaactttaaccaggataattcacggttaaaatagtactttggacttgtaaacaacttatacaccccctatggtcaaggaaatttccataccaaatatttcgctaaaatagatagaatctcgattaaacgtccaccattcaagagaaatattttcctttgtccgtacgtgaacaattaattctttatccctctcttctaatcgtatctcgtctattttttgattacttcccgcatctaatgaacaggctacacggacgatagcaacaagctttgtaacctgtattttttgtaattctgttagcactctaaagcaatcatcatcatctgaaggtgtccctttatagtggtaataaactacattcgcaactacttgtttttcttcctctgaaagtccaaatatatcagttcccatgacgatatgatacgcatgcttgccatgatttctaaggcttacaaatttaccaacagaacacaagattgccgctatacgacacaaatatccccaccgctctggcaagcctttatgacgcaatgcattacaaaaggctaaactaaaacgttcaacctccctatcatgtatagaatcggtgtgataacgagccgctatagcacgtgctaagtcagcattttgctcacgtaactgatacatatacggatgattttcagattctacaccgtaaaaccaactaataccttgtgaaaaagaataactactaaatattaaagactctggttgaatcgcattaatgatttctgcaaacaaaatcattgtaggcataagaatattagctttaaattccggtatcttataccgattcatcaatttggtagccgtaataccatcaaaggagtctactagctctttaaattgctgtgggttaattgttgtaataggttcactatcactatatcccatcaattgtaagattaaacgtgcttcatcaccggaaaatatgacattcttaatattaaataattgcaattcttctcgcaatggactaatcatacgatgcaaatattctgtaatagcagtgctaaacgatatagaagccctttgatttctgttaaaagactccataacacggagagaaccactatgcatgttttgttggaataacaaagatgctcctctccaagctgttagaccaacccctccagatgtaacatctgcaaagagacaagctgtatcctcatctgtcgccttatgatggtacatcatttcgtaatatacaagagcgtacttaaaatatacctctttaggcatatctatcacttcaacacgcatgccagtttgtataaaaatctgatccaatatagcccttctattagtggcctctcgaattacggtagtgccatataaacgacatctagacacaccataatcagccattaattgtttatagcccttaagaatgtcacaaatctcttcaatcgttttaaagctaagacgtgaagtttgaaataattcttctccaaaggtcacttctcgagctgcataatcgatgacacgtacatcatcaatacttttgtattctaatattgtaatgctcatgctactagacccaacatgtaaaatagcatatctgagcacttttgataatgtcatacctacctcctactgaggggaccactcaatttctaactgacgtttaaattcctttttaaaaggcttcactaatttttcaacagccccttttgttatatcaatatctcgatgctttggatactgtataatcaaacgcacctcatctggactaattcgactatctaaattcataaccagctgttcatgactttcatcaagagcctcagcaatagctagaataattgacaacttttgccctatcgaacgctgctcatcatccagtagtttaccgtacaagaagtttttatattccttaggtgttaaaccatgcgaattcataacgagaaacgcactaaaagcctgttcaatatgtgtcattccgtatagattactgttaaccagcatatagcaaccatgtctagcatgactataataattcacacgtttgccaatatcatgcaataatgatgctacttgcaaacaacggcgcagcgcattatcgcccttatgcaaggaccaccattgttcaaataatgtatcagctaatctgcaaatatatttagcatgaacgagctcatgacgtgtcatctccaataaaacattttctgcagagtgaatcaatatatctggaataataggattaccacctaaatagttatgcccataataatcataaaataaaccttctcgaaggccagaaccacctacaactaaggttttacaattcacataattaaataattcatagacgatactcattcccgcaattatgatatcagctcgctcggatgaaagaccatttatttttttgcgttgccctaacggtttagatttaacctcatccaataattctgtaaaacgatggtatggaatctcataattatgtaatttagtaataggatatgataatttacgttgatccattttggctatatttcgtgcagtaccaccaatacctaacagaggcattttagtgttcttaagccaaggctgttcctctatgacctttctaatggccttaatcattttattgtattctttgtctgtaaactcatcgcccttctgataggttccggttaatgttaaagcaccaataggtaagctaacagactgttcaatttgacgatttcttactaatgtaatttcagtactggctccgcctaagtcaaaaataacaaaatccttgagaccaatcgtattaataacacccaaaaagcctaaacgagcctcttcttctcctgaaatacattctaaatcaagcccggtctcacgtttcacggtttcaataaattcatcaccatttttagctaatcgaacagctgctgtagcaacagctttaatagaatttacttcaagcgcttttgccatatgtacataagactgtagcgatactaaggcacgattcatagcaggttctgtcagtttatgattgccccacatattttcgcttaagcgaatggaatttttttcctgataaattaagcgataactacctgtatctgatatttcataaataacgaatcgaacggaattcgatcctaagtcaataaatgcaatgcgttccatcttatcatcctttgtaagcccaaatcgatatagactatatatgttagtataccatagaaaaacgcgatcctttctacgaaagaatcgcgtcctaccaaggatatatgtataacccataattagtccacatatatcctataaactagcagtatttattttattccaaatacacgtttgccattttcataagcaatcgaagcaaactcatctacatccataccgcgtaacgatgcaatttcctgagccacaaattgtgttttactcggatcattacgacggcctctaaatggaggcggtgttaaatacggagaatccgtttcaataagaatacggtcgagtggtacttgtttagcaacctcttttaactttgtagactttggaaatacaacagggccggcaaaggatacatagaatcccaatttaagagcctctttagccatttcccaactaccggaataacaatggaaaatcccccaattgtccttgccttcgttgcgcaatatatccatgatatcaccatgggcatcacggtcatggatgataataggcaaatctacctctcgagccaactcgagttgacgtataaacaccttcttttgcgttggtctatcagaaaaatcataataataatctaggccaatttcaccgatagcacggaccttatcattgtgtaatgctaactctttaaaatattcatagtcatcatcagtaaaatcttttgcttcgtgagggtgtgtgcctacagctgcatataaacggtcatcagtttcagccaatgcaacacctgattcaacagtttgtctatcaacaccaggaatcataatgtattcaacgcctgcatcgaaacaagcttgtaacatatcagctctatcgttatcaaaacgattatcgttaatatgtgcatgtgtatcaaagagtttcattattttacaatgctccctgctggtaatgattcaatattggtaacttctaaatgttcttcccaatctgaagcggataaaatcataccataagattctatgcccatcatctttttagggctcaagtttgctaagtaaattacctttttaccaaccatagattctggctcgtaatattgagatataccacttaatacagtgcgttcttcaaggccaatatccaatacgaatttcaataattttttagacttaggtaccttttcacaacttacaaccttagcgacacgaagatccaatttttcaaaatcatcatagctaatgttttcttttaaaggtggaatattagacgtatcaacagattctgtagttttttcttctacagcagcgatgtctaccatttctggaacttcaaaacgtggataaattggctcaccttttacgacctttgtaccagttggaataccaccccatgtacgtacatcatctaattggacatgctcaaaaccacctaggcccaactgttcccaaatttttggagcccctactggaataacaggacttacgagaacagcgatgatacgtaaactttcagcaagatgatacataacagattgcaaacgacgtacatccgcctcttcagagctcttagccaatatccaaggcatagtttcatcgatatatttattcatacggctgataaaagcccatactgttttaagggccttatttaattccatagcttccatttgagcttcaaaatctgctaccgtttgttctgccaaggaagaaatttctttatctaaatcatctacatcatcagtttttgtgatgatgccaccatgatatttttcaatcatcgcaatagtacgatttaaaagattacctaaatcattagataaatccgcattaattttggttacaaagttaggcaatgtgaagtttccatcatggcctaatgtaatttcacttaacaaataataacgcaaagaatccgcaccatatgtatcaatcaatggatttggatcgataacattacctagagatttactcatcttggtaccatctacaatcatccatccgtggccaaatacctttttaggcaatggcaactcaaggctcatgagcatcataggccaaataatagtgtggaaacgaacaatttccttgcccaccaaatgaagatctgctggccagaatttcttatatagttcaccatccccatcgaaaggagataatgcgctaatatagtttactaatgcatcgaaccaaacatacacaacgtgtttcgggtcgaatggaaccttaatcccccagtcaaaagatgtacgagaaacagccaaatcctcaagaccttgttttacgaattgaatcatttcattgcgacgagattcaggttgaataaaatcaggattttcttcgataaatttaagccattggtctgtatatttaccaagtttaaagaaatagctttcctctttaacgcgctctacaggacgtccacaatctggacaggtatgattttcaccaagtttttgttcagtccagaaggattcgcaaggtgtacaataccaaccttcgtattctgctttgtaaatatcgcctttttcgtaagctttcgtaaataattcttggactaccttttcatgacgtgcatcggtagtgcgaatgaagtcatcattggaaatatgcattttttcccataatgatttaaatccattaacaatattagtcgtatattctaatggtgtaataccttgtgcctcagcagcacgttgaattttttgaccatgttcatcagaaccagttaggaatcgtacatcataaccagctaaacgtttaaaacgagcaattgtatcagctacagatgtacaatatgtatgacctatgtgcaatttagcactaggataataaattggagttgtaatataaaatgtcttctttgtatcgcccatcataatctccttctattcatcacttgtgaaagtgttatcgctctacaatattataaacctcacggcgagaaacgccaaagcgttttgctacttcgcgaatagcttccttctttggtactcctgtttctactaattcggctacggctgcttcataggatataggttgttcttcattatcatcagtcggttcacccgtctcacaaccacctatcactaagacaaattcacccttatagataatttgatctaagtcatcacaaatggaagctaaatcactgcgtaaaaaggtttcaaactttttagttacctcgcgagcaatcgtaattggtcgattgccaaaggcctcatacatatcacagagaacctcttgtaaacgatgaggtgcctcataaaatattagcgttcctcgttgtttcgccataagctgaagagcatcattgcgatgtttcccacgctttggtaaaaagccgaagaatgtaaattgtttagtatctaaatcagatgcaataagcgccgttaatgctgcattagcacccggtaagggtacaacggatatatcttgtgcaatggccttcgatgcaagatctgcaccagggtcagatatagcaggcatgcccgcatcactaacacaagcaatattcttcccctctaataacatctctataataacagttcctttttcttccttattatgttcatgataagaaatcaaaggcttactaatttcaaaatgctttaacagtataccggtgtgccgtgtatcttcggctgcaatagcatcaacctctcccagtatccgtacagcacgatacgtcatatcctctagattgccaatgggcgtaggcactaaatacaaggtgcccttgttattttcgttcataccaacgagacacctcctccgtgtacacattaggttggatatatacgattaatggcggctcaacgattaacccttgttcaccgccctttatggcctcaatcaaaacgattttagccggtttatgaatcataccatgaaccatgcgtattcgtttaacagcaaatccaaccgctgttaatgcatgtatgagctctgataaacgaggtgcactatataccatccataaacgccccttatttttgattaatcgcgaggccgctttacatacatcatcaatagaagtacacccatcatgtaatgctaagcaacgatgattatcattaggtacttcacctcgtcgatgatcgaaataaggaggattcactagaacaccatcaaaaggtttggaaccaaattgctgataattcatagtgcgataatcaccttgaactatggatataacattagatttatgattatatagaacactgcgttcagccatgttagccattacatcattaatctcaacacctgtaatatgaccagcacctagagatgtacctattaacggtaatacccctgtacctgtgcctaagtctatataccgatgacgctgattaaatcggcaaaaatgaaccaatgcaatagcatcaaaggaaaagcgaaattgatcttgccgctgatatatctttaaatcatcgataatcaaatcatcgagttgctcttgattattcatctggcaatgccacatcagaccattttaaatcgatggttcgacctgcctccaactgaaccttaactgtatgtttatgatgatttaccttaagaaccttgccgataccttcatcagttacgacctctttaccgatacctggtggctctacgtcgcgaggcgaaggagttctatccttcttcacataaaggtctccaccctttttatataaatcgtcttcatagtttaaacagcacatgagacgaccgcatacaccagaaatcttggtcggattcaagctcaagttttgatctttagccatacgaatcgatacaggtgagaaatcacctaaaaagttagaacaacataaaggtctgccacaggcacctatgccatttaacactttagcttcatcacgaacacctacttgacgtaactcaatgcgcgttctaaagacagtagctaaatcctttactagctcacgaaagtctatgcgcccatcagctgtaaagaagaatacaattttattcatatcaaatgtgtattctacattaattagcttcatcggcaatttgcgcttcgcaatcttttctaagcatatagcaaaggctttttcttctcgttcctcattcttttctaattgttgtaaatccttaggtgtagcctttctcattacttctttaacaggcatcaccaaagaatcctttgcaacctcttttggtccaattacaaccgtaccatattcaacgccacgcgctgtctctacaatgacgccatcatcgattgttagagtttcttcgccaggtaagaaatagtaaatcttaccagcctttttaaatcgtacgccaacgatggttaccatctaaacctcctcacgagcatcgtgaagggcgatactaagaccgtccatcacgagagcgatttttatgtgtaaccgcagtgcctgttccgcgcgcaatgtttcatgagctacagttgctaaagcggccattggccaatgcggtaataattctaataatactgttctatgcatgggtacttgcagttgctctatggttgcaccacatttaagggccatcatatcgcgacttaacaatcgtaaccaatgcattaaatccaatgcatcatcacgggtcaatgactcacaccatatggcaatctttgaaaaccatcgtgaatcagagcctaatgttcgcatccattgtatggctaattccaacatggctatcgttccctgttgtactaatgcttccacaacagcagggttaccatggcccatcgaaatagcttcatctatgtttcctgtaataccacgttgctgcaatgcgtagcgaatactttcatccgaaacggattgaaagcccacacccatacaccgtgaaataattgttggcaacacaagattaatcttgttcgtaataataatgaagtacacctgtgccggtggttcttcaatcgtttttaacatggcattcgccataatagcattggccatgtgaaagtcttcaatgataacgacgcggtttccaagaccagcaacagatagatgattttgcaatagggaataccattgttctacttttaaggttgatttcataggacgaatccaaaatgcatctcccttatccatataaataggtaaaccttccgcttctattttcttttcactttcaccattggcaaggcgtgcattttttacctcgtctagatattcagccccattatggcctggaaatacctgccgtcctaaaatcaacgatgctaaccctatagccatatcaagtttaccgagtccagcctctccatagaacaacaagctatgtggtaatgtttgccgttttaccaattcagttaggtggtttttaatcgtatcttgaccgattacattatcaaaatatgtcataatccctcctatcctgtccaatattactattatataggaaaatggcgactttttaaagagtcgccatgtcctaagatatgtgattgtatctatcgcaatatcgtttttaccacatcgtatatgtcattgtgtatagattttatactgcgcattgtaaaagttccagattcatcttgttgggcacaggaaatacgatgccattgataacgttcaactaattcatcataggcattgtgaacagcttgcaaatacactctatttccttcgtgtatatcccctgtctctccccctgttttaccagttcgctcagacatcaaagattccgtcacgtctaatggaacatcaagcaaacataccgcatcaggacgaggtaaaccaaacttaacaaattcaaagtcttccaaccattctaaaaattgaacacgtttatccgcgtccgtatatttcaccatttgatgaaccatatttgacgtcgtataccggtcagcaataatgatgccaccatcattataaaatgactgccaatccattctaaaggatgcaaaacgatcgatagcatacatagagcttgctacatagggattaaccgagtctacatccgtgccaaattggcccgataaatacatcttaattggcatcgatgcatcactatcataatttggaaagctaacactgcgcacacgatgaccttctgcttgtaatcgttctaccaagcactttgtttgtgtagctttgccactgccatcgccaccttctagtatgattaaagtccccatctctactcctctacaacttgtatcgtttctaagttcatatcggctgcaccatttggcatataccccaatgcacgccgttgttgtatatattgtaacacagattctgtaatctcttcacctacggctatacaaggaattcccggtggataataagcaatggtttcaccgcaaatatgatgtaacgccgactcgaacatacaggatctacgctccttataaagggcttccctcggtgtcatacgtacaacaggaataggcagaatggtagctgactgaatagtctcagtacgttcctctatttgttcaccagcacgatttattaaggatgacttactacaaatctcatcgcttatagcctgtacagcctttacaagagtcatgatagattcttctgtatcacctatcgtgatgagtactaacacatgatgcgcctgcacaagttcaacttcgatatggtgagcacgtaatcgtttttcgaaatccacaccggtaagccccaattccttggcatcaatcaacacctttgttacatcatagttaggtctatctacatccttgcttgacatgatagaaatgccctttatggcttccaattcacgtcgtagttgtaaacttaatgacacagcatgatttaccaaattcctaccttccgtagccaactgatggcgcgccatatcaagggatgctaaaaatatataattaggactcgtactttgtaacatctgatgcatttgtgtaatgcggcgtttattaattaaatcgccttgccctaatagccaagaggtttgcgtcaaagaacctaccgatttatgcgtgctttgtgccactaagtctgcacctgacgcaatggcttcaacaggtaaattttctgaaaatggtaaatgaggtccgtgcgcttcatcaacaagaacaatcatccctcgtttgtgtgcttcttgtacgatagttacaatatctacacctacaccataatagtttggatacactaagagaatcgccttagcctctggatgaacatccatggttttaatagcagcatccactgatacacctaaagggataccccaccgattatcaaattggcaatccatataaacaggcttagcaccagataacactaatccactaataacggaacgatgtgcttctcgcggaatgataatcgtttcatcaggacctacggttcccataatcatagcttcaattaaggccgtggtcccattaatagaaaaccaacagtgatcagcaccatataactcagctgttaactcttgcgcctcttttaactctccttcaggttcatgtagatcatctagagcatacataacccctaaatcatatggcagtgctgctcccatccagtcctttagtaactgaggcgctttaacaccaatcttatgaccaggtgtatgaaaaggcacaaaatgttgttccttatatgattctaaagcctctacaaaaggcattttttcttgattgctcatatatacctcgtaaaaagggcatgaatctcaatgagactcatgcccttatgcatgttatttatcgctgtggacgacgcttaggattaaactgattcatccctttgtctatgcccacctctaaggtgcctaatacagcttttactgtgtctttgatacctttttgtactttctcttgattttcttcactaaatggtgctaacacgtggtcaatgacagtccattgtggtaatggacgaccaatacctacgcgaaaacgcggaaaattttctgttcctatatgggagattaaagatttaatcccattatgcccaccagaactaccatttggtcgaatacgtaatttgcctaccggtaaatccatatcatcataaatacaatacacatcagatggatcgatcttgtagtatcgcattaatggacctacagattcgccacttgcattcataaatgtttgaggctttacaagcaataccttttcaccagctacattaatactgcacacctctgccttttgttcttctctccaaggagtgtgagaaatgctatccgcaatggcatcgatgaccataaatccaatattatgttttgtcgcttcatattgcttgcctgggttaccaaggcctactactaacttcaagaatcacctattatttatcaaataaattacttactgaaacttcatgaaagatacgcataattgcttcgcccaataatggcgctacagatagttgcgttacattgtctaatttgcaattttctggtaatggcattgtgtttgttacgataagctctttaatgttggagtttgcaatgcgttcacttgctggatctgttaatacagcatgggtaacagcagccataacagatttagcaccaaattcttttaatgctttagcaccttctacaagagaacctgctgtatctacaatatcatcaacgatgatacagtttttgccttttacatcaccaatgaggttcataactttagctacgcctggttcagggcgttttttctcgatgattgcaattggcgcaccaatgcggtcagctaaatcacgagctcttgtaacaccgccaagatctggagatactacaataacatcttcaagatttttttcattaatgtatttagctaaaatggatgcaccatataaatgatctactggcacatcaaagaagccttgaatttgacctgcatgcaagtcaattgttacaagacgtgtaataccagaagtttgcatcaagtttgctactaattttgcagtaattggttcacgaccacgagttttgcggtcttggcgagcataaccgtagtaaggaactacagctgtaatatgacgagcagaagcacgttttaacgcatcagccataaccattaattccattaaattatcgtttacaggatagctagttggttgaatgataaatacatctttgccacgtacgctttcatcaatcataatttgtacttcgccattattaaagcgacctacaaacgcttcacctaaaggcaaacctaaataatcacaaatttcctttgccaactctggatttgcgttacctgtgaaaatcttaagttttttgccgtcttcaaatgccattttgataccctttcatttctccgtaatcttagttagttactcaatgtatatgtaacgaaatattacagatatacaaccttattgccttattattgtatactatttttcctatcttgtgtgaaaaatttttgataaattcttatttctttttgaaagtatcgtctgtaacccaattttctttcacaatttgcttgctacgacctactgctaatgccttatctggaacatttttagtaatcgtagaacctgctcctacatagctataattaccaattgtaacaggtgctaccaaattgctgttacagcctacaaatgcaccgttgccgatagttgtacgatgcttgatttttccgtcataatttaccgtaatcgtaccgcaaccaatattgacaccagaacctacatcgctatcgccaatataggatagatgagggaatttggtgccttccccaacattggaatttttaacctcaacgaaattaccaatatgaaccttgttgccaataaccgtattaggacgcaaatgaacatatggaccaatatctacgccatcttttacttcgcagtcatgaccataggtaaaatgaattactgtattattgccaacagttacattcgtcaagcgtgtatgaggtccaatttcacaattttcaccaatcaccgtattgccttctaaaacggtactaggatgtagaattgtatcagcccccacagtaacctctggtgctacataggtattatcaggatcaataatcgttacgccagcggtcattaattctacatttttacgatgttttaaaatagattctgcttcagccaattgcaagcgagagtttacccctaacgattcttcaaaattttcagtcatataagcgcttactttatcgccgccatttacgagaataccaaccacatctgtaatatacagttcaccttgtgcattatcgtcggataattggccgagacaaggccatagttttttactatcaaaagcatacataccagtattaacttcttgtacagctaactcttctgatttgccatccttttgttctacaatgcgtactacatgaccgtcttcgttacgaatgatacgtccataacctgttggatctggcatatgggccgttaaaattgtagccgctgctccagatgcagtatgttcttttaaaagagcttctaaactttccttagttacgagtggcgtatccccacacaacaataaaatagtgccatcaaaagatcctaatacaggttctgccatttttactgcatgacctgtaccattttgctcttcttgacgtacaaattcagcacgaccttctagatagtcttgtactgcattaccaccaaagccaacgataacaacatccttatcggttccaagagattgaacagtttctagaacgcgttcaaccatagctttaccgccaactttatgaagtacctttggcaatttggacttcattcgtgtacccttaccagctgctaaaataagacttgcaatattcatagtaaactcctatctatcaatcgtatcaaatacaggttcgatgtgaatttcatttgtactttcatcaatgccatggaacgtaaatagtgattcataatcattgattaacttaggatttggttcagcagtagccactagtacacctgttcccaccactttaccattcatctcatgcacaagctcagtcaggcctttagccgtaccgccagccttcatgaaatcatcaataattagcaccttcgcattttgtggaatagcgcgtttagttaatgtcatcgtttgaattcgcccagatgaacccgttacatagttaatactaatggcagatccttctgtaaccttactatcacgacgcgcgataacaagtggcttgttgaaagccctagccaccataaccgccaaaggaatcccttttgtttctaccgtcaaaatataatctggattgcgatctacaaagcgagtcataataatttcgcccaaccgagtcatcacatgccaatcatacaaaatatccgacatataaataaatccaccgggaataatacgatctggttcacgcaaacgttgctgcacatcgcgtaagatttcattggcctgctcgccttttcgatgaggtatgaatcgaacaccgccagctacccccgctaccgtttctagagtacccaactgaaaatgttccatcgattgacggacacaggttaaatcttcacttactgtagatttcgccattccgaaaaaatcacaaaaataattaagagatataagtttttgtggagaatcgactaataatttagtcattgccaccattctttcaacacgtcgaactttattcataagccttcctttgctgaatactcgatttatattgatatctatattataccatgaatttccgaatattcgcattgagaaaaaatatataattcggaaaaagctctagtcatagactagagctttcaacagtttatatatagttataaaatatatacttttacagtttgacgaccaaatcgcaaagcttctgcacgagaattaaaggctaggtcaatacggctacctttaatagctccgccaacatcatcagccacggcatagccataaccttcaataaacatctttgtacctaatggtataatccgtggatctaccgaagcaatacctttttttaagcgactgccagttgccgtataattactattccctgggtcctgagcactatatgcactagcatgcatcatcataacgcgtacatacttattgggaaccccattatgactacgcgagatggcggaatcgccaaaacgagtttcttccttttctaaagcactcatcgtagccgcacctacacgcccatctacagcgaggcctttagccttttgaaacttacgtactgctaattcagtgttacgcccaaaaataccatctgctgaatcattaagatatccttgatgcactaacatggtttgaattttctgtacatgatgacctcgttgtcccttatcaactgacgtcgcctgtgcgaaggccatcatattagtcatacatagcacagtacatagtattaaaattctcttaatcacgtacattcccctttattgcttaacttagcaattatgatataccccaatatgacattcttttcgtttagcccctacaattcgtaagtagatataaccaatgatagcagaaatgatggaaccaatcaacacgccacctttagccatctcttgagcatgacctggatcataggccaaaacagacacgaatatactcatagtaaaaccaataccacacacaatggaagtgccatatataaacttccaattggcttctgcaggcataggaacaatacctaatttaatcatcccaaacatagcaccaaagataccaatttgtttacctaaaattaggcctaatgcaacgcctagtacaactggatgacttaaatcagccatgccaaatccatcaaggttaacaccagcgttaaagaatgcgaaaataggaacaataacaaaacttacccagttggataaataatgttcccagtgttgcatcggtctcacatattttttaccgattttgccgcgttctggtattgtcatcgcaagaattacacctgccatcgtagcatgtaaaccagaccgtaaaatacagtaccataaaataataccgagaataatgtatgataaggatcgtacatatccggttcgattacaataaatcaataaccccgtcacaataacggatgccactaaataaaatagattaatacttgctgcatagaatatggcaatgacgataatcgcaattaagtcatcaataacagccaaagctgtcaagaacactttcatagaattaggtacgcgagaacctaatgcagtaataacgccaatggcaaacgcaatatccgtagcagtcggaattgcccagccatgtacatatacatcattggatcctgctataaggtagaaaataatagcaggtacaataaccccaaataaagcagcaatacctggcatgatgcgcttggcatttgtgtttaattcaccgcttaccaattcacgttttacttctaagcctacaaaaagaaagaagatagccatcaatgcatcattaacccattccatggcagttaatggacccaatggtaaattgactaatgacatgtattgtgtcgccaatggagaattcgcaacgattaaagcaataattgtagctcctagtaatacagtagttgcagcaccaggagaacgtaaaaatacaaatatccgttccatatgattccttcctaatattcttaactcactacttatttctagccgttctaattttatatgctactgataaaacggtagcacctaataaaccagatataatagatccaataaaaataccaattttagacatttcttgagttacaccaggcgggaatgccaaagtggccacaaacaaactcatggtaaaaccgataccacaaacgatagcagtaccatacacctcaggccaggttgtattcgtcggcatcttaattatcttggattgtactaatacgtaaacagcagagaaaataccaagctgtttccccaagataaggcctaatgaaacacctaaaacgaccgggtggaacaaatgatctacagaaacatctgagaaggatacaccggcatttaagaaactaaataaaggaataattaaaaaattaacccagtttttcagtttatccgcccatgcgtgcatagggtacactgtttcgccatccaacttacccgttgcaggaatagtcatagctaacacaacaccagcgatagtggcatgaacaccagattttaaaacaaaataccaaaggacggcacctagtacaccatataaaacgggtctcacatagccttgtttattcgtataccacaatgcacctgtcacaatagcggcaacgattaaatgaggaaaatctacaccaccaccataaaatatggcaataactatgatagcaattaaatcatcgataacggccagtgcagaaaggaatgccttcatcgcctgtgatacacgtttaccaagcatcataataacgcctatagcaaatgcaatatcagtagcagtaggtatcccccaaccatgcgtgtattctggcacagagccggcaattaaaaagtaaactaacgcaggtgttaccactccggcaaatgccgctaaaactggtaacaatctctttgagttggtgtttagctcaccagaaatcatttcagtcttaatttcaattcctacatataggaaaaataaagccattagaccgtcatttacccactccaatacatccattggacctaaataaatatgcatcatagaaaaatactgttcagctattggcgaattggcggttataaccccaagaatagcagcaagtaagagcataataccgcctgatgattcagactgaataaatgctttcatatatttcataataactaccactttctcaatcataatataaatacaggttttaacacataaaaaacctagttgatatatattattatatcattttagttcgaaatcaatcaataaactaatgatgaaccatactgattaagtctagagtaatcaaacatttgcgacatacttatactgatggagcaagctaataaaatactagattaataattattccctctgatcagagaaattaagaatacaataagtggaatagttaaacaaatggcagctatactatttgtgattggattagaccaaagaggcacaataaaacctaggagaactaaaatgctataaaggataggtttacgccaaacatgttgtatctcaacgggtgctttagattccatagcacgagatttaacaaatttctttttaatagtcatcataatgcctgttataatacctacaataagaactatatcccagatggcccataatattttaagtaccattgtattatgattatgaatatggagattaatcattgtagtcatgcccgtaaaataccaggggatattttttgtagaatacatatccttagtagaatcagtatataaattagcatagactggttggcccaagaacatagctggatcatcatcattttcagcacctaaataaaatgcataatgatgattattaaatttagatggataatctatagatataagctgacgatctgggtatgctttcataattcgagagatagcttcagatggttgtaaaatgtcagattgaccaactgcaagttcttgctttgcagtgtgtagtacatctgcattatagctgtcattagcaataaaaaatccacctatccacacacctgtaatacataagataaatccccatacagtagcaaccatagcaaattctcggtgtaatgtacttaatgtcatatagttagacaatacagtagatttggcaaagcttttacgaaatggaccatataaaaaaacaccagaaataatagataacccacatactaaagataaaatcgttacaatataaattcctgttttaccaaggtctaatcgagtatgtagttgatgaagtgtgtgtaatacacttcgaacccaaggatgtgcaggcgtttcatgatgcgtagtaataagcccctttgtttcaggattatataatacataatcccctcccatccccatacgcgctggaggtgctacagttgcggaagaatcaataatgcgataccgtaaaatatgtgcagcccccatagctggagaaatatttaaaatatccttagacggatatttttctttcactaatagggcaccttcatcagcataattaaaaatagatatttcttgttggctcatcgccattgatgacgaggaatgatgtgaccctccttgagcccatgcatttaattcagttctgaacataaggacaagacctgtaatacagaacattaagaaaaatagcacagaaactatagataaccatttatgaattttataaatttttgacatacatatgcctccttcctcattattttatacatctattttggtagtaatacaatacaattaccactatgggtatatatagtataattaactgtacttgaataaaaagattaatgtatgatacaatatgtacatcatgcgggcgtagttcatcggtagaatgcgagcttcccaagcttgagaggagggttcgattcccttcgcccgctccatattaaaagccatgatgtgaattacatcatggttctttttattttgttactatataatatttttgagtgattaaatttatatctatctgtataggaggaaaggtatatgaagcttagtgcaagaaatcagttaaaaggaaaaatcatagaaattcaagaaggtgctgtaaatgcaattgtaaaaatcaatgtaggtaatggcaatatccttactgcagatattacaatgcaatctgttaaggaattaaacttagcagtaggcaaagaagtcattgctgtcatcaaagctactaacgtaatggttggtattgaataagaactaatagagtcgcttcggcggctctttttttgtctaaaatcacgacaggactgtaggagttaaaaatgccgtacatctcaccctaactgttccttaaaccctgcttggatagaaggttacaaaaaaagacacaccctaaggtgtgcctttagcttaatcagcgacttcctatcctcccaggccgtctccagccaagtactttcggcgtttacgagcttaactactgtgttcgagatgggaacaggtggaccctcgtagctatcgccactgaatctgtcagagtttgtactctgaaaaccacatagaagttatatatatttgttgcacatttccgcttattgttattaagtaaagccctcgatctattagtaccagtcagctccaagcctcacagctcttccacacctggcctatcaaccatgtcgtctacatgggatcttactagcttatgctatgagaaacctcatctcaaggctggtttcacgcttagatgctttcagcgtttatccgtcccgaacgtagctacccaactgtacccttggcaggataattggtacaccagcggttcgtccactccggtcctctcgtactaggagcagcccccttcaagtttcttgcgcccgcgatggatagggaccgaactgtctcacgacgttctgaacccagctcacgtaccactttaatcggcgaacagccgaacccttgggacctacttcagccccaggatgtgatgagccgacatcgaggtgccaaacctccccgtcgatatggactcttgggagagattagcctgttatccccagggtagcttttatccgttgagcgatggcccttccactcggcaccaccggatcactaagcccgactttcgtccctgctcgacctgtccgtctcgcagtcaagctcccttctgcctttacactcttcgagcgatttccgtccgctctgagggaacctttgggcgcctccgttactctttaggaggcgaccgccccagtcaaactgcccgcctaagactgtccagccggttgttaatcggcctgttagaaatcaattaatcaaagggtggtatcccaacaacgactcctctaagactggcgccctagattctaagtctcccacctatcctgtacattcattaactaagttcaatcttaggttgcagtaaagctccatggggtctttctgtccagtcgcgggtaacctgcatcttcacaggtacttcaatttcaccgggtccctcgttgagacagtgcgcaagtcgttacacctttcgtgcgggtcggaacttacccgacaaggaatttcgctaccttaggaccgttatagttacggccgccgtttactggggcttcaattcagagcttcgaccgaagtctaacccctcctcttaaccttccagcaccgggcaggtgtcagcacctatacatcagctttcgctttagcaggcacctgtgtttgtggtaaacagtcgcttgcgcctctcttgtgccactcattcatgctccacgcgttactgcccttcacactacatgagtcctccttttcccgaagttacggaggcattttgccgagttccttaacgagggttttcccgcgcaccttaggattctctccccgcctacctgtgtcggttttggtacgggcgatgtgtctctacctagaagcttttctcgacagtgtaggatcaatcacttcgctgtaaacagctcgtcatcacatctcagcttttagagctacggatttgcctataactcaacctacatgcttaaacacgcacttccaatcgcgtgctgacctaccttactgtgtcactccttcgatcaaacgattcacaccggtacaggaatttcaacctgttgtccatcgcctacgcttttccgcctcggcttaggtcccgacttaccctgagacgacgatcgttgctcaggaacccttaggctttcggtggaatggattctcaccattcttttcgctactcataccgacattctcacttctcaccagtccacaactccttacggtactgcttcaatccgatgagaacgctcccctacccatatacattgctgcatatgacacgacttcggtttcatactttagccccggacattttcggcgcagagtctctcgaccagtgagctattacgcactctttaaatggtggctgcttctaagccaacatcctggttgttttggaaattccacatccttcgccacttagtatgacattggggaccttagtcggtgttctgggctgtttccctcttgacaatggaccttatcattcactgtctgactcccgagtataagtatagccattcgtagtttgactaggttcggtaaccggtatggcccctagcccgatcagtgctctaccgcctatactctcaacctcgaggctagccctaaagctatttcggggagaaccagctatctccgtgttcgattggcatttcacccctatccacaactcatcccaaagcttttcaacgctcacgagttcggtcctccacacaattttacctgtgcttcaacctggccatggatagatcactacggtttcgggtctactatcactaactgaacgccctgttcagactcgctttcgctgcggctccatgttttccacttaacctcgctagcaacagtaactcgtcggttcattcttcaataggcacgccgtcgtcctgatatatatacagacttcgactgtttgtagacatacggtttcaggttctctttcactccccgccaggggttcttttcacctttccctcacggtactatgcgctatcggtcgatatcagtattttggcttggagggtggtcccccctgcttcccacaaggtttcacgtgtctcgtggtactctggatacagtcccatgtatgcaaggtttcgattacagggctttcaccttctgcggctgagctttccaactcgattcttctacctcatttacacttgatgactgtcctcaaccccgatgcggttgcccgctccggtttggcctctttcccgttcgctcgccgctactaagaaaatctcgtttgattactcttcctctgggtaattagatgtttcagttccccaggtgccctcctcatactcaaaggtatgggtgacagtgcataaccactgccgggttcccccattcggaaatctacgggtcaaaggttgcttgcacctctccgtagcttatcgcagcttaccgcgtccttcttcggctgatatcgccaaggcatccgccgtacgcccttaaaatctttacttaaaatacaatatatttcgcgattatctgcgtcatactgcgttcggcttgtcttgcgtacactagtacgcggcgactacgccttactggtattccttgatactcatcgaaatctattgattttcgatttcattgacatgcattagatacattgtcgtttattttgtagccgtacattttcatgtacgtcaccaataagtcagagaattatttcctatgtgctcgggtcaacctacttagaaattctaagagatgaccttacaaatatataataattaacacttctatgcagttttcaaagaacaaatctgccgatgtataaatcagcttatgtagtttagcacttaacatcatagatgtcaaatactaaatggtggagacgaggagattcgaactcctgaccccctgcttgcaaggcaggtgctctcccaactgagctacgcccccatgtattaaatggtgggcctaggtggactcgaaccaccgacctcacgcttatcaggcgtgcgctctaaccagctgagctataggcccatttaatatatgagaaatttattatcttgtagataacagatctctcaaaaccgaacaatgttaggtgccaaagtgtcgacctaagtgacatccaagctcatggctcggtgtatgtctccctagaaaggaggtgatccagccgcaccttccgatacggctaccttgttacgacttcaccccaatcatcgactttaccttagacggctggctcccgaaggttaccccaccggctttgggcacttccgactttcgtggtgtgacgggcggtgtgtacaaggcccgggaacgtattcaccgcagtatgctgacctgcgattactagcgattccgacttcacgtaggcgagttgcagcctacgatccgaactgagagagtgtttctcgggtttgctccacctcgcggtttcgcttccgtctattaactcccattgtagtacgtgtgtagcccaggtcataaggggcatgatgatttgacgtcatccccgccttcctccgcattgtctgcggcagtctctcatgagttcccacccgaagtgctggcaacataagataggggttgcgctcgttgcgggacttaacccaacatctcacgacacgagctgacgacaaccgtgcaccacctgttttctggcttccgaagaagaggaaccatctctggttctgtccatcaatgtcaagacctggtaaggttcttcgcgttgcgtcgaattaaaccacatactccaccgcttgtgcgggcccccgtcaattcctttgagtttcaaccttgcggtcgtactccccaggcggggtacttattgcgttaactccggcacagaaggggtcgatacctcctacacctagtacccatcgtttacggccaggactaccggggtatctaatcccgttcgctcccctggctttcgcgcctcagcgtcagttttcgtccagaaagtcgccttcgccactggtgttcttcctaatatctacgcatttcaccgctacactaggaattccactttcctctccgatactctagattggcagtttccatcccatcacggggttaagccccgaacttttaagacagactgaccaatccgcctgcgcgcgctttacgcccaataattccggacaacgcttgccacctacgtattaccgcggctgctggcacgtagttagccgtggctttctattccggtaccgtcaaatcctcgcactattcgcacaagaaccattcgtcccgattaacagagctttacaacccgaaggccgtcatcactcacgcggcgttgctccgtcagactttcgtccattgcggaagattccccactgctgcctcccgtaggagtctgggccgtgtctcagtcccaatgtggccgttcatcctctcagaccggctactgatcatcgccttggtgggccgttacccctccaactagctaatcagacgcaatcccctccttcagtgatagcttataaatagaggccacctttcatccagtctcgatgccgagattggatcgtatgcggtattagcagtcgtttccaactgttgtccccctctgaagggcaggttgattacgcgttactcacccgttcgccactaagattgatagaagcaagcttccatcgctcttcgttcgacttgcatgtgttaagcacgccgccagcgttcgtcctgagccaggatcaaactctccaagatatcttgaagctatttgagtagctcaatatttgttgtcgttacatgtatgtaactttgaattatggttggttttgactatgtcaaaacccgcactctggcatatgttcaatcatatgattgattacctatcattgttcagttttcaaagatctgtttgctagtcactgtcctgcgctagcgacttgattataataccaagttcagagtatttcgtcaagcacttttttaaaactttttgaattaaattcaacggttttaatgatgtgctgtcatccgaattacgctgtgtcctaacgacttgtattagtatatcacaaacaaagaaaacgtcaaccgctttttcaccactttttacaacttcattattaactcatttatattcaatgttttgccttacgtagcttgttactatatcattactatttcatataaaaaacacgtatttacctagtattttgatagtttactatcatacatactataagaaatacgtgctttttataatgcttattccgctatatatgagtgtttacgaattacaaaatgatataaagccaatgctatgatcattatgagtgatgtaatttgatataaagattgatatcctaatgcatttgcaattaaggctaagataaccgatccagccccgacggctatatcaagtgctaaaaagtatgtggctgtagaaacgcctgcacgttctattggtgctgattgaactgctaacgcttgaaatgcaggttgagctgctccatagcctagcccaagtaatggcgcagtacaaataatcccaaccggagtcgataccactccaagaatagcgaggcctacgataaataggcctacaccaggatagatgacgaaccgtgatccatatctagcatatactttacctactaatggtcggctaataattatcatgagcgcaaacaaagcaaagaacacactcccccatacacctgctcccatactattcaattcaataggaataaatactagaacaccagagtatgtaaaacctataaacaatcccattaatgcccaaggaagacttcgtttctctataaactgagatatactccatcccttagaagatttttgtttcgatttagctaactcttttggcaatcgaatgacattactcaaaataaaagctagcgcagtcattatagtcagaaatatatatagcgctgaacttccataggcttgtaatgcatataagccaacagcaggacctaataccatagcaatatttgagaatacagcaaacatattgatgccttcacctttgcgtgaagcaggcaaaacaactacggccagtgctgccataacagtagtacctaatgcaaatatagcgccatgtaaaccccgtagcacaaaaatcgtttgtaacgatgtggttaaattaaacaaccccataataataaagaataaaacagatgaaatcaataaaattatgcgtttgtccaatccatcaattaaacgtcctgcaaaaggacgacataagatggtcccgatttggaagtatgtcatagccaatcccgcatctaaagcggtgccacctaattcagctgttaaaattatgggcaatgccgccactaagacatattgggtcatataaaaaatgccactacttacaccataattgataaaagcaggactccataaacgttctgaactcactatatcactctttctacttaaaaccttatatagtatttattgtatgttatttctatttgaatcacaatgatcttactcataagaaaaaccccaatcgcaataaaatgcgattagggtttatagctttcaccataacaatcaaattattgattgcgaatatcgttcttatttctatttttccagagcacccataaagatgtagcgacacagatggaggagtatgcaccactggcgaaaccaataatcatacatagagcgaagttttttgttgtatccccaccaaatacaaatagagatacacaggcaaacattacagtagctaatgtatagatactacgatgaatactttgtgcaatagaagcattcgccaaatcttcaaatgtatcagtacgtttatgagtatgagcattttcacgaacgcggtcaaagataactacagattcgttcatggaataacctacaacggttaagatggccgccaagaaagatgcatcgatttctaattggaagaatgagaatacacctaataccataatcaaatcatggaaaatagcagtcaatgcagatacggctattctatattcaaaacgataagaaatatagagcgccaatacagcaaaggcaataacaagattcaatagcgcatgttgcgttacttcagagccgataacagcaccaacggtttcaatacgttttactgtgttttcaccgatatcactattcaatttttctactacagctgcactttcacttggctccaagttacgagttcgaatcataacatcttcgcctgctgtttctgcagtatcaccagacaattgaatttgtgcattttcaaggtcgaatgttttcaatacatcacgaacttggctaacctctacaggtttagtgaattgaacctctacaatggtaccaccagtatagtcaataccaaagttaaagccttttgtaaaaatagaaattaaactaatgattactagaatggaggaaatcacaaaccaccaacgatgatgtctaattacgttgaaactcatttgcgcttacctcctttcaaagattttggtgcaaaatcatcagaacttttacttggtgagatattagcaccaaaccagaatggatgattagtaaagttacaatcaattaataggcgaagcaagaaatggctgacagtaatcgctgtaaacatacttacaacaacacctacgcccaagctgatagcaaacccccttaccggaccagagcctaagactgtcaagataccagctgtgatgataacggatacgttcgcatcagtgattgtagaaagagcccgtttaaaaccagcctccatagcaacacgcatggatttaccagagaaaacctcttccttaaaacgttcgaaaatcaggatgttcgcatctaccgcaacacccatagacaagataatacccgcaatgcccggcaaggtcatagttgcattaaaacctttacctaacacgagaagtaataacataacatatacaagcaatgctacattggcaacaaagccggataaacgatagagcaaaagcaagaataccatgatcatggcaataccagcgccaaatgctactacggatttatcctttgagtcttgacccaaagaaggacctacagtacgaacttcaaggacattaatttttacaggtaatgcaccagaacgcaataaaattgctaaatcttttgcttcatctaaggacttactaccagaaatagtagccttaccaccggtaatagcttgttgtactacagggtttgtgagtacttcaccatcgagagtaatggaaatatgacgaccaatatttttagatgttaaatcagcaaatttctttgccccttcatcactaagctcgatagcaactaaaggttgtttattttgacccatttcctcttttgcatcttttaggtcatcaccggtcataacagtttcgcctttttcatttttaaattcaaggaccgctgttttaccgatacgtttcattgcttcatcaggatctttaacacctggtaattcaatgataatacgttttgccccttcccgttgcacaataggttcggacagacccatttcattaatgcgtcgttcaagaatttgttttgctcgttctaccgcatcattatcagctgtaccatgctcagtatcctctgcttctagcacaatatgcgtaccaccttgtaaatcaaggccttgttttaatgaaccagctagaggtccaataaaatacgcaaaacaaccaataattgcagcaataacgactaagaatttaactatagccttgcctttcaaaatcgttgctcccttctaaataacatgaattacaccctgttctgtaacgatagcgggcatacgttgatcatagcgttccatcggaatcgggtttttcataatttgcgcttcccatgcgacaccgatatagttcgatggtgaaagttccttaaggaaacgatcataataaccatttcccattcccatacgaccaccaagccgatcaaatccggcaccaggcactagcacaaaatcaatatccttagggtttatgatttcatagggctcctttgggacacggatatttaggacgccatgcactacatcgtgaagattatgaagtcgtacagcaatcatcgtagtcttatcagtacaaacaggtacataaacgcgtttacctgcctgtaaagcatgttctataacatcatccaaattggcttctttaggcatcgctaaataggccataatcgattgtgcctgttcatactgaggtaatttaacaatctcatgacatagcttaggtgcccaagattcacaatctgcaatagataaagcagcgcgctgggacttgcacgcctggcgcactgcttcttttgttatcattacttagtttccttattttttttagaaactacggatgcgatagcagtacgagcaaatgtcatttctactttttccgctacttgtaccttaactttttcatcatcaagttcgataatttcgccatagataccaccaatagttacaattttttggccttttttcaagctgctcaacaaattagtacgttctttttgttgtttcttttgtggacgccacaacaagaaataaaaaattacgaccatcaaaaggattggccagctagtttgtaaaatttgttcgatatcacccatgggtaatcctcctcactaaaattcatcttatctttataagtatatctattcaaaatgaatttgactagtttttttatattatttattaaagttatcccaaaattgcattctaaattgagggaatcgatcctctaaaatagctttacgcatctggcgcataaactctaataagaaatataaattatggtatgtaacaagtctcaatgctaaaatttcttccgccttatataagtggcgtaaataagcacgagaataatttttacatgtataacattgacaaccttcttcaagagggccccagtcatgcgcatattgagcatttcgaatattaagacgcccatgccaagtcatggccatcccatttcgcgcaacccgtgtaggatatacgcagtcaaacatatcaataccgcgagccaccccttctaccaaacagtcagctgtaccaacgcccatcaaataacgagctttattggttggcaacaacggtgttgtatattcgagaatttcattcatcaaatcatgtggttcccctacagataaaccaccaatgctgtatccttcaaagtccatcgccactaattcagctgcactttgtttgcgcaagtctttatacataccgccttgcacaataccgaacataccttgtctatcatgagcatgacgagcctcttgacatcgatgtgcccaacgcgtagtacgcgctgtagagcgtttcgcataatcatgttctgcaggataaggaatgcattcatcaaaggccatcgcaatatcagatccaagttgttcctgtacttttgtggccacctctggggaaagaaattgtttagatccatcgatatgagatctaaatgttaccccttcttcggtaatcttacgcatatcgcctaagctaaatacttggaaaccaccactatccgtaaggattgcttgatcccagttcataaatttatgaaggccaccagcttcctctacgagttcaggaccaggtctcaagaacaaatgataggtgttgcttaaaatcacttgtgacccaatggcctttagctcttctggcgtcatcgtttttactgtcgcctgtgtcccgacgggcataaacataggtgtttcatacgtaccatgtggcgtatgtaacaatcccgcacgggcacctgtgtgaggacatgttttctgtaattcatatgtaatactcggcatagaatctcctaacgtataaacatagcatcgccaaaactaaagaatcgatatcgttcttttacagctgctttataagctgctaaacaatgttcacgaccggctagtgcactaatgagcattaataatgtagattgtggtaaatggaaattggttaccaatgcatctaccatcttaaatttatagcccggatagataaagatttttgtccacccacttgtggcatgtagtataccatcatcagtagaggctgattccaaggtgcgaatcgatgtagtacctactgcaataatacgcttacccttagattttgcttcattaatacgacgcgctgtatcttcagatacgctgtagaattcgctatgcatatcgtgatcttcaatagtttctacggatacaggtctaaaggtacctaaaccaacatgaagggtaacaaactcgagctctacacctttagctttaattttttctaatagttccggtgtaaagtgtagtcccgctgttggagccgcagcagatcctttttcctttgcatacacagtttgatagcgatccttatcctcaagtttttcatgaatatatggtggtaatggcatttcaccaatttcttgaataatatcatcaaatacaccatcgcaggtaaattccacaatacgaccgccaaaatcggttttatctagcacagttgctttcaaccgatcatcaaacacgatgacctgtccaatcggacatttcttacctggtttaacgagacattcccagcgattttctccacatggtgtaagtaataaaacctccaccttgccaccggaaccctctcgttgaccatataatcgagctgggataaccttcgtattattaaacacgaggacatctcctgcttgtaattcatcaagtaaatcgtaaaaatgcgctttatgtgtatactcaccagttattttatccaatgtaagcaagcgcgatgtgtcgcgaggctctacaggatgttgagcaataagctcctctggtaaatcataatcaaaatctgtaactttcattcttatccttaatacatttttttcaatgtaataccactatagtaatgtcttaaaattgtttgataataattggtatcacccgtaccagctcgtttcgccatttcagcggcgccccattgtgacataccaagaccatggccccacccatgacctttaatgtacactgtatcattcttgcctgtgaaagtatgatacgctttaccagttgaacttgctggattttgattgacataaaaatcaaataatgttgactttaaacctaacatgccccgcaaatcatcaccgcttaccgtaaccttaccagcagtaccaacgaaggtcgccgatttaatacgcccagatacgcctctatcggctgtagccttgccaggatttcccaatggggttaattgaatacttttcaacttacccactcccttactagcagcatttaacttgccctctaaagcgctacggcttgtggatacagtccaatttgacgcactagaattgctatttgaaaaatctttaacaccttttaagtacggaatatcattgccccatacattgacactgtcctcggtatagccaccaccatcagaatggaacaaggcattaataggacgattattatatagcataacaacgcctttagtatgattaacagcagccgtagtactttgtgtttcaccgctcacaccaccatatacttgatgatctgtagacgtgctcacatcatagagctgatttttattttgctccatcgtatgtagtgcatacgtacgagccgctacagcttgcgcttctaaggccgctgctggccaagatggaatcgcctcttgtggaacaacaccatataaatacgattccaatggaactgcattaataaccatcatagctccattattggcccgcaatgtaagagcccctcgatacgctttaccttcaaaggtaaaaatgtcaccactcgtaggttttaatgtgacaacagaatcaagagctttgccattaacagcaatcttattgcctcgtacacctacggatataaccttatgactaccaaccttaccattattgctagtaagaacggttacaccatttgcactcgatacggaggcatcttgacgacgagatccaagtaaaacgcgaacgtccggtgtattttctacacgaacgcgcgttgttacttgttctacttgattcttcgtcaccactgcagccgttgcacgagatgctgtagtagaagttgtaatcttcggttttacagcagtagtattagcaacctttggttttgcattggctacggtcgtaccctttggttttacgtttgattgtgcagtaaccttaggtttaacagttgtagttgctgtaactttaggtctaatagtcgtagatgcagtaacctttggcaccggttttgtaacaagcggtttaaacgtggattttccaatagttccacgcacagcttttacaggagtttttcccgacaccgttgttgatgatttagctacaacaggttttgttcccgatttacctactacctgtgcagcctcaacagttgcaaaactatgaatgcctaacaataatgttgtcataatcattaatggtaattgtttctttttcattttatttccctgtttgcgaaatacctagatgatcataagccaatttagtagccacacgcccccgcggtgttctacctaaaaatcccaattgcatcaaatatggttcatacacatcttcgatggtatctctctcttcactgacagcagccgctattgtttctatccccacagggccaccatcataattttcaataatacacttcaacactcgtctatcaatgcggtcaagtcccatcttatccacatgtagacgttttagcgcttcatctgcaatatccgcagtaataacgccattccccacaacttgtgcaaaatcgcgaactcgttttaacaatcgattcgcaatacgcggtgttcctctcgagcgtcgagcaatctcactagcaccagcttgctcaatgccgatatttaagatatccgctgcacgagttacgataaattctaattcttcttgtttgtaatattccaatcgactcacgataccgaatcgatcacgcaatggagcagccaatgccccagctcgtgtcgtcgcaccaaccaaggtaaatttgggtaattcaatgcggacggaacgcgcacttggtcccttgccgatgatgatatccaaggcatagtcctccatagcagagtacaatacctcttctacacttcgtgaaagtcgatgaatctcatcgataaacaaaacatcatgttcatcaagattcgtcaaaatagcagctaaatctccggccttttctatagcaggacctgatgttatacgaaaattaacacccagctcattagcaataatgccagctaatgtggtcttacctagccctggaggaccatataacagaacatgatctaaggcttcaccacgctgtttagtagcttgaatataaatattcagattatccttagcctctcgttggccaatatactcattaaaatacttaggtcgcaaactatattgccacacgtcctcttctcgatcaccgccgcctacgaggcgtacttcttcgttcatggctaacgtcctttcccaagttcaactaaacaagcttttatcaatgcagatacatcttttgaaccatcgtttaaggattcaactagtgcttccacatctttttgcgcatatcctaatgataccagtgcctcaatcgcctccccgctcggtccgctatgagtaacaccaattggttggatggctgcaggtgtttcaacactaatctgagtcatcttcactaacttatcctttaattctaggacaagacgctctgccgactttttccctatgcccggtaattttgttaattgttgtacctgaccattaataacagccaatttgaaagcctctggcgtcatgccggacaatatgcctaaacctacctttggcccaatcccagaaacagaaatgagcagaataaaaagttcgtactcatcctctgtccagaatccgtatagttgcatcgcatcttcccgaacattgagataggtaaacaatgtggcctcttgcccctctattaattgttgtcgtgtagtggttggcacatacacacggtaccctacaccatgtacatctacataacaagattccttgaatagatgtgttacaatgcctcgtacatacccaatcatttaattaacctcatcaatctatcttggtgagaactatgcgccgtacaaatggcgactgctaatgcatccgccgtatcatcgggcttaattttctcacgaatccccaaaatattcatggtcatataaataacctgatttttatcggccttaccataaccggtaacagcctgtttaatttgtaatggcgtatattcatatataggtattctctgttgctctgcggccagcaatataatcccacgcgcttgacctaccttaatcgccgtcgttacattacgattaaaaaagagttcttctacaccaaatttatccggcttatattcctctaaaatatcgcttaaatcattaaataagatttctaaacgctgtgcatccgtcagctccttcggggtcgtaatagctccataggctactggcgttagcttgcttccctgcacgtcaataatgccatagccacaaattgccgtacctgggtcgattcctataatccgcactccatccccctcagtttaaaaatgagataagccaaagcttacctcgtaacactcataatctattttattatagcatattagaacatcgaaattcatgaaatcacgatatttttattacctttttacaaggagaaactagaggaagacaaaaaatgaggagtgctcctagagcactccctgtttctattattcttcttcgtcgtctggcaaaataccattgtgatatacgttttgtacatcatcaaggtcatccaaaacatcgagcattttttgcattttttcagcatcgtcaccagataattcgatagttgtatctggaatcattgtaatcttcgccacttcagtttctatacccgcatcagccaaggcttgttctactgcatcaaaatcttctggcgttgtatagatttcaaatacatcatcttccgctttaagatcttctgcacccgcatcaagagccaacaatgtcaattcatcttcatcgtgaccttctttatcgataacgaatacgcctttagatttaaacatccagcctacacaaccgctttcaccaagattaccaccttgtttggagaaggcatggcgcacatctgcagccgcacggttacgattatccgtcataacctctacggtaacagccacaccggcaggaccataaccttcatatacgatttcttcgtatgcattcatatccgtagcgccaacgcctttatcgatggcacgttgaatattatccttaggaatattgttttcacgagctttttgtaaagccaatttcaagcgcatattacctgttggatccgcaccacccatacgtgctgctacggtaatttcacgaccgattttcgtagctaatttagccttcaatgcatcggttttaccttttttatgtttaatatttgcccattttgaatgtcctgacatagacgcctcctatttattccaccatgcttcgccccgtaatcgatctaagatgattgaaacggcactacgcacagataaatgattgtattcaccatggccatatataggttctaaaatatagtcaaagctttccatcgtttcttttgtcataccataaccggtaccaaataatactaacacagggcggccctcattttcaaggtgttcacgcatccgtgcataggaaattgtattatcataagttctagcatcggtagttgctacgattggttttacctcttccagttcctcgatagtacgcaccgccacagcgatagaattaacgagttcaacgcctgtgaaagcatcttttctatctggattataagtactaccaaaaccagatttccaatgttccataatggtagccgctaactctcgttgagctgggatattatgaatcacaaaatatttagacacatcataggtgatagatgcgcgcgcaatatcgtgaatatcataatttgtaatggccgtcgttatcacatctttatgcttattcataatcggataatgaacgagcccaatatataaatttgccaatactatatctcctaaatcttaaacaacttttatcaatacatagtaccatcatatccattacgaagcactagaccgtgcaccagcactgccaaaaccagacttttgccctatagatgatgctttcttacttctattattctcataactacgaaaggttcttccacctccatagccatgtatagttgatcctgatgacgtatattcattaggttgttcatacggttttaatggcgataccgcgcgatatgtcatagttcgtccatccatacgtgccgtaggaggattaaacccatgaaacatataatacccagctgcaatagttggtaacaaacttgccaaaccagcatcccacactaagtttccaccattatcacggtgaaaggtaactgaacgattatcgtcatacagggcggtttcttttccatcaccatggtttaaaagagaataccgattaccttgactatcctttaatcgaacctccccctcatttgcctctggataaaccttatcacacacagcataggagatatcgttccagtatgaatacatacctacaagaccagcaactgcggcgaaagcacctgtaaggtatatggttttcttacttggcttatacataaaacgctcccttagtgcacagcaccgctaataacaagagcaagaccaacgaaaatgccaaatacgagaataccagccgctgtattaccacgcataatttcttcggataatttatatttacgatgccaaatattgataaacatataacccgttacaaatagtataatacctagcacagcgtatacaacactggctacaatgccatgtaacagggacgtatcagccgtagtcacggctggtgacataataacagcgcgcaaaatttcaccgataccgataaatgatcccgctgaaagccacgccacagcacaattaccacgcttaatttcttcactaaattttccaggcacgaagaaatcgataaccgtattcgccgttaacatcagtataatgccaaaacaagcataaaaaattgtcaataatacatctggtatataaatcataataagcctcctaataatataattttgtattggatgtgttgttagagttgctggtaggatacaatcgttcgcgtcccgtattatcccctagtcgaaccatggtcgcatagttatctagtatatgagagctgattaatgtacgatcaataattttccaatcctcttgtgttaattttgattgttcacataccttaaccctagtttgtccatccgtattagtgatgagatacaccaagtccccagaataaaatacaataacttcatgtccctcttctaagttatcccgctcattcttaatatcaccattcacagaatcaatcaagtctaatgcggtactaacaggatctagtgtagacgtgtatacatagtcgctatccgaatctgtttttgtataatatgcagatgtgtcatgcatatgttcttttaccgtgtaaggcactccaaacatagcgcgtatactatgccaagacaaatcattgtccgaccaaaataaaaatagtaaaaatagtacaccataccccacgccaacagcaatagatccaaacctctttttcattgatttgttacgcatcttttgcttaatagcttgagcggctgcatcattacaaagacgaatgttcgccaagggcactcgtgatccttcggcaaacatttttttaccttcaaaccactcttcttcaaagaatacactagcaccaccttcacaaggtagctgatattctcgatatcctgcgcggtcccctacggaggcaccactttcaccatccacatcgacaaccttttctaaaccgatttgatgtaatgtaaaatctttccccggccgtgtatgaaaggatgttctagatacggtacaccattcattatcattatactcaatggttaaccatattttatcgattccctcaacagcctctagtccatattcatgccaataatcaccaggtgattttgtcatagacggctggcccctataggattgttccttatctgcttttggaataatctctatatatttaattttctcagtgattacataacggctgccatgaacctctaagacatcataacaattaaactccatacgcaccctctctaaagtagacataaccacaactgctgcgaagtacacctattatccttcgtttaaccatactctatatggtcaaaattacatagtatttctcttactctattagtaatggtacaaaatatgcttctgtaccagctatctcctctggggaaaaacggcaccctaccgcggaggcttgatcgccaagcataaaacaggataaggttaagaatccatctttcactccacaatccactgtatgagtaaaacgtttctgctgtataaagtcttgatacatcacctttttactatcacgacaaacgatatcgtcatagttatcaactaacttttccatgtaaagcttagatgaatcaccacgcttttgaacaacttgtacatgccttccttcacggccccaaatttccttttgaatataaaggccatcatcaagagctgaaaaatcattttcaaaataggatggtgccaaataacgctcgatgatatctcgatccggtttcgtataaaattgatctgttaaatacaatgcatacactaaagacataaaggatttattttgtaaaataattgactctggcggattaaaaagagcaaatgtatcatcctcgtacaaatctaagaacatttcacccaaaggttcgccatctggtgtttgttcatcaatcaaaagctccataggatgcaatcgatacaatagagtcgcatgactaccatcttctaaaggaatgccctcatcatcaatcttcatatcataaaaggatatgaatcgcgtgtctgcctcaggacaggctgtttttaattccctcataaggaattgtgttgtaccgtagtcttcaaaataatcatgaaaacaagagaatacaaagggattcttaggtaggctctctctatttacccgcatagattcatattggtttctaccatacttagcagataaaacagcgtcatacatgcgctttaaaaatgtatgtaattcatttcggcattctatattaggatgttttcgtcctacataattagctgccacttcattggcataatagctttcaataagaaaacatggcgtatctgcattaagttctaccatctgcaaattgccatttacatcgagaacaaaatcaaagcgtgataaccacgtcggtaaccctaaggcattcgacttatgtaaataaggaattaaattatctggcatatccatatttcgagcaaagtcatctggtgccatttgaaatacttttgcagctttacaaaatatttgaaataatctacgtgaagcatggcgaatttcatcgtaaaagtcggatgaaaaggcctgcatagacaaggagggataccgatcatcatacccttcatattccacgaaattaaatatgtttctatcaagctcatcaatataggatttcattgttcatcctttcattaagaggcaccgctcgaagttcgagcccctacactaccaaagccatacttttcaccaattctatgtgctcgattactcgttttagtattgtaacgatttctagtcatttcattaatagttctagccactcttgcactattagatttactagcgcctgtacttgcatcaaaaggggtaagaggtgatgtagcgcgataggtcatactaggtgcatccatatatgccgttggagctgaaaaaccatgaaatgcatagtatcctaccgccaaagtcggaatcaaactagctaagcctgcatcccatataatatcacccttctcatcacgatgaaaggtaacagatttttctgcatcatcatagagtgccgtttcttttccatcaccatgattaatcaaggtatagcttttaccttcatcatctatgagccgtacttcaccattattcgattctggtttgaccacatcacatagagcataactaatatcgtcccaatacgaacaagcgcctactagagctgctatagatgtaaaggctatggctatgtaaacagtattcttacttggttcatacatataatgttccttcgtttgatttcgtaactgaaatcaatactatatcaatcttttattatatttgataacgtcttacgtccctgcttattctttaattccaccatatacgcatatcgtaacaatatttcactgtcatttctaatagtcgctatgcgtgtattctccgaatctgacaagttttttaattcccccacttcaacatacgtagtgccattaaccacactaataacagatacctctttagtcgtataaatgacaatccatcgctcaggagacttagtgtcttgtttaatattataaaccttgccatacacagcatcgataagatcgatagccgttgcattaggatcttgctttgacgtatataccatcaaaccgtcttttgtgccttgcggttcataataataggaatctttaatccgctcttccatggtataggggaatcctacttcatcacgcaattcatgccaagacagatctcctataaacaaatatcccaaaaagaataaaataattccccaactcagacccaatcgtgtccattcttttctgcgagctgcattacgaatctttttactcgctgtttgagccgcctgatctcgccgtcgatgtacatccgacaaacgaatccgctcaccttgagcctgatccgtcaaaccaccatgccagtcctcaataaagaatacataggtcttatcatttttaattgatctatattctttataatcggccttatcaccgcttctagctttactttcacccttaacagacatgacgcgttgtaagcctttatcgtacagtttatatcctttaggcggcgttgaacgtaaaatagtctctgaaaaggtacaatagtctttttccccatttacaatggtgagccattttttatcttcaccatccactagcataagaccatattcggtccaattcttagcccctttatgagtacctaattcattattatacatttcatcattaagagtataattcactgtcttttctatgatgaattcttgataggagataacttcagtaactacgtatcgctttccctgaatctctacaacatcataacacttaaaattcatagcctagactcttcttcaacaatctcttttaaaagtttaacttcctcttttgttaatggtcgttccaacaaatcaggacgcaacaatcgtgtccgctttaaggcttccttttgacgccatgtggcaatatttttatgatgaccactgcgtaaaacatccggtacagtccaccctctaaattctggtggttttgtatattgcggacattctaaaaggggctcataaaatgaatcctcttgggccccactagctgcgcctaatacaccgggaatcatgcgagccactgcatcggctacaaccatagctggcaactcgccccctgttaacacatagtcaccaatggaaatggtttcatctactaaatgttcctctacgcgatagtcaacaccttcataatggccacatacgagaatcagttgatcataagttgctagttctctagccttttcctgtgtgaaaggttgacctgtcggtcccataaatacaatgcgacgacgtatactttcactaggattaccaataagactcatctcatcacacatctcatccgtttcgtaggcaccattaatagcactatcatagttagagacaacagattctacggcctcaaaaataggaggcgccatcatgagcataccggccccaccaccatacggtgtatcatccacttgtccatgtttattatgactaaaatcacgcggattcgtcacagccatatctagccggcccgcctctatggctcgttttatgatggaatgactaaagaaggcatcaaaaaactctggaaacaaggatataatatctattttcacaacaggcctcccccgaatacacttattattatcatatatctatatatagctatcttataattaattctatcataagacacctataaatagatataaaaaaccgcctaaatggattatacccactcaggcggatctacgatcatcatgcgtttgtccatatcgatgtcaatgataacatcatcaatggctgcaaacaattgatctggttccccttctttggaaaccacatatacatcattagctcccggttgtaatacatccgtcaatgtaccaagtacattgccctttgtatcttgcacctcaaggccaatcatatcaaaaatataataacgaccttctggtaattctaccaaatcttcacgacgtacttgaatctctttcttagcgaataattcagccgcgttgcgatcaggaatttccttaaacgaagctaatacgaattgtttatgaaatcgtgcggatgcaacgtggtattctttaccatcgatgtaacaggcatccatatgcatgaaccgttctggaaaatcggttctaggcataatacgaagatcaccccgcacgccgtgcggggcgatgataacacctatagtgatgaaatcgttaggcttcattattgacgaaacgcaacgattttaccgtcttctaataggatttcagcgcccatcatggcatccaaattatccccgattttaacggtaacggtttgctctaatgtaccttgaggaatttcagtccccaatgtcaattcttgagcatctttcaatttagctgttacttcttctttgaaagccaagcgtttatttttctcttcgtcgatttgttgacgaattgcagtaagacttgtcgcatcaactttagctacatcagctaaaatacgttgagcttgaaactcaattgcttccaaatctttattcaccatatcaaggcgagtttcaagatcggatacaattttcgctttcaaatcttctgttacttttgcttttactgctacagggacacgtaatgtcatttcttccattggaacactcccttttagacaatatcaacagatatctttttgttctctttaatagccgccgctttcaccacagagcgaattgcttttgcaattcgaccttgttttccgatgactttacccatatcctctggagctacatgaagttcatagacctcaacattgcccttttggaccatggtaacagaaacggcatcaggctgcttcactaatgatttcgcaattaatgaaattaattctatcatcacagtatgcctctctattaattactttttagcgtctgcaaatttttgcataacgccttgttttttgaacaaggagcgaacagtgtcagtaggctgagcacctttagctaaccaagccaaagctttttcttcgtctacattaacgatagctggttgtttagtagcatcatattgaccaattgtgtcaacaggacgaccttcacgtggagcacgtgagtcagcaactacgatacggtagaaaggagcttttttagcacctaaacgagtcaaacgaatttttaacatgtgggattcacctccttataatgatgtgctggacaggttcagcgcccctgtccatgtattacataaacggtaattttggcattccagggaagccacccttaccgccacgcaatccttgtaaacgcttcatcatcttccgcgcttcttcgaattgttttaataagcgattgacgtcttgtacttgtgtacctgaccccatcgcaatacgcttgcgacgagaaccatttaaaatatttggatcttgtcgttctgcagccgtcatggatttgatgatagcctcgatgcgacgtacttctttactattcaaatcaaggtcttttaattgatccttaatttgacccatgcctggtaacatgccaataatattttgcaatggccctaactttctcacctgattcatctgtttcaagaaatcatctaaggtgaaattgtttttcgccattttttgcgccatttcacgagcttcttcttcatcaatagcgccttgtacgctttcaataagagttttgaaatcccctaaatcgaggatacgagaagccatacggtctggatagaatacatcaaaaccatccatcttttcgcttacgcccgtaaacttgattggcaaaccggttacagccttaatggataacgcagcaccaccacgcgcatcgccatcgagtttagtaaggataacaccgtcaacgcctaatttttcattaaacgtttgtgctgtcgtcaccgcgtcctgaccaatcatagagtctacaacgagtagaatttcatgaggtcgaacagcagctttaatgttggacaactcatccatgaggacttcgtctatagccaaacgacctgctgtatcgatgataaccacatctttcaacatatgcgtgctttgctctacggcacgacgcgcaatatctactggattagctcctggtgtttcatcagcaaatacagggatatcgatttgcttacctactacttgcaattgcttaatcgctgctggacgatatacgtcggctgcaacaagcattggatgtttaccttgtttgcgaaggtatacagccaatttaccagctgtagtcgttttaccagcaccttgtaaaccaacaagcataataattgttggaggcttactggaaatcatgatacggctttgcgtaccacctaggagagctgtcaactcatcattaacgattttaataaccgtttgagctgggttcaaggatccgaacacctcttcaccaagggccttttctttaatggatttaacgaaatctttcgccaccataaagtttacgtccgcttctaagagagctgttcgtacctgacgcaacgcaagattgacatcttcttctgtaattttgcccttaccttttaaggatttaaaggcgtcttgcagtttttctgacaaactatcgaatgccatattatccctccatttgcgtcaataattgttgtacccgcgattgtgaaagcacatccgctggcaacgtatcttttaattcatttatcacttgctctcgtgcctcatattgagccaccaagtgtaatttagattcatagtcattcaaaatatgacgtgcacgctgtaaattatcatgtacagcttgcctagatacgccaagctcctcagcaatttctccaagggacatatcatcttcgtggtgaagttgtaaggacatgcgttgcttatccgtcaacaatggcccatagaaatcaaggagtaaactgataagtactcgttcttccatttcgccacctccatcactgtcaagtcatattactttacatatactacagcataaaaaaagatgtgtcaagtagaaatacttaacatctaaattatagagaattattttcatattttacttttatatctactgtaatatgttataataaacacatctaatattttcaatataaaagataggaggtattgtatgaataccaaacattatgatcttatcgtcctaggtttcggcaaagccggtaaaacattagcagctaaatttggctccatgggcaaagccgtagctatgattgaagaaaatccactcatgtatggtggtacatgtattaatatcgcatgtatacctactaaaacgatgattatagccgcatcaaaaggcttatcttacgatcaagtattaaaccaacgcgaggtagttacatctcgtttacgcaataaaaacttcggtatgctagacacaaatgaacatgtcgatgtatatactggacatggtgaattcattagtaataaagaaatcgccgttacagctggggaagacaaaatcatcttatctggtgaaacaattattattaacactggtgctgtagcgattaagcctaacattgatggcatcagcgcagcaacaggcttctataacagcacagaaattcaacaattatcgcctcaaccaagtacactaggcgttatcggtgctggtcctattggccttgaatttgccagcttatacgctaaactaggtgcaaaggtaacagtatttaatattgaatctagcatcttaaaacgggaggaaccgatcgtacaagaattagctaacgagtacttgactgagcaaggtattactattcttaacgatgtaatattaaactctgtatctaatgatggcaacaaacctgttattactgcaaatggtcaaaactatacatttgatgccgttttatatgctacaggtcgcaaaccaaatacagctaacatcggtttagaaaatacggatattactactaacgaacgcggtgctatcgtagtgaatgatacgtgtgaaagctccgttcctggcgtatatgctgtaggcgatgtaaacggtggtcctcaatttacgtatatttctctcgatgacttccgcattgtatttggtgcacttacaggaaatggccaatacacattaaaagatcgcaaaaatattccttacacaacatttttaacaccgccactggcgcgtgtaggtctcacagaagaagatgctatcaacaaaggctatacagttaaaactaaagaaatgctcgtagccaccatgccaagagctcatgtaaacgactatttaaaaggtgcttttaaaattgtagtaaatgcagataacgatttaatccttggtgctacactttattctcaaggtgctgaagagttgattaatctcattaaaatggctatggataacaacattccatatacatacttcaaaaatcaaatcttcacacatcctaccatggcagaaaacctaaacgacctttgtaacttttagtgccataaacaaaatcaataaacaaatgatataaaacgaaaataaaagggcgctcattagctaacatatatgctaataagcgccctttaactatttagaaaaataagatgcgattaaaattattctctattagttttttgtaaataatctacgtactaccttttgtagttttggtgtcaatataatagccaccacaatacctgcagcacttgtaattaaggagtattgaattttgctagctgctacggctgcactttcaagaacaaaccaccatgctaagaaatagccaaatgcagtccaaattgtaccaataataagagcaatcaaaatacgtgtaaaggatgctgtcggctttgtaatggatggtggcaagtaacctgctgtcataccacctacaataagacctgcaatacctttaataaagaaagagaatacaatgtattgcgtatgtccaccaaagaggtcaaataatgcagaaccaatagccgcacctaaaccaccatataaaccgccaaaaagaatggatgatgtaaataatgcagcagatcctaagtgaaccatggccccacctggtatttcaatgcgaattgtagttgctactgcacataaggcagcaataaagccaatataaacaatatctcgtgtttttaatttcatagatagcacctctcttttagatgaataactatatttagtataacaaatctcaatcagtctaaaaacacttatttcataggaattaaatatatagccagatttaaaataaagcacctataccttcgtataggtgctttatagtatttgattatactctatgcgtaatcttaaattttagctcgttttaaacgaagtgagttgcttacaacagtaacagaactaaatgccatcgcagtacctgcaatcataggattcaaggcacctacagcagccaaaggaataccgatacagttaaagatcaatgcccagaataaattttgtttaatattggtcatcgtcttacggctaagacgtacagcttgtaccaatgtatgcaaatcattgcgtaccaaaacgatatctgctgcttctacggcgatatctgtaccactaccgatagcaaaaccgatatctgcagttacaagagctggagcatcattgataccatcgccaaccataccaactacaagacctttatcttgcaattcttttaccttgctagccttatcttgaggcaacacttcagcaattacatgagtaatgcctgcttgttttgcaatatattgagctgtacggcgattatcaccggtaagcatccagacgtcgatgccttgagactgtagttcttttacaacctcaatagtttctggacgcaattcatcttctacagcccacaatgcactgatgacaccatctacagcgagaacagatacagatgcaccttgttcttcaaaatgttgaatatcatcttgcaccttagataaatcataaccaagttcactcatccaacggctatgaccaagttgtacagatacgccttggtaggcaccttgcaagcctttacccggtacatcgccaaagctttcaagttcaacagccttccccttgtagccatgatcttcaccataataaaccatagccttagcaatcggatgcgatgtgccgctttcaagagccatcatgatggacatgttcacactttcatcaccactatagtttttgaatgccgttacatcgagcacgccttgtgtaagagtacctgttttatccataacgatggcatcgagtttaccagccttttcaagatattccgcactcttgatgagaacaccatgttctgcgccaaggccagaacctaccatgatggatgtcggtgtagcaaggccaagcgcacatggacaagcgattactagaacagcggtcgcattaataagggctacattgatagaatcgcctacaataaagtaccacacgagaccagttagtacagcaaggccaataacagttggtacaaagtattgagccacaatatccgcaatacgttgaatgcttgctttagatgtttgagcttcctctacgaccttgataatttgagataacatcgtgtcgctaccaatgcgctttgcttccattgtgaaagcaccacttaaattgatagtcgccccaataacctcagagcccacttgtttttctacaggtaagctttcacctgtaagcatagcttcatcaacggtagagtaaccttctgtaatagtaccgtctacaggaatcttttcaccggcgcgcacttgtaatacatcgccagctaccaccttagaggtaggaatatctacaaattcaccatctcgcaatacatgagccgttgccggttgcaaagcaattagtttttgaagcgcttcagacgtacgccccttggctacctcttctaacaatttacctagaagaataaatgtgataagccatgcagaggtttcaaagtaaataccatgaggaccaagttctggatggaactgccagttataaatactaaatagatatgccacagtcgtacccataacaacgaggacatccatcgtaagagccccattctttacggcactccatgcactcttatagaacatgagccccgggccaaattgagcgatagtggctaatacaaattcaacccaaaccggcaacgcttgaataccaaaacgatgcaaggtcatgttgatcatcatcggtaccgccatacaagccgcaataataaggcgtgtaatatgtggttttaaattaaccttttctatttcttgtttcgtttcatccgcttcagtagcaccaaaaccgatattcgttatggcatcgataatttgttgtggttctacggtagcgccatccttaaactctacactccccttacgggttagtaggttaacctttacagaagctacgccatccaccttggatacgacgttttcaacacgttttacacaggctgcacaatgcatgcccgtaatgtcaaactcttgtttttttgtactcatatataacttccttcaaaacaattcaaatcagagattcataaaatatgataaatacagtatatttgtaatatttatcacatgaactaatactcatatatctactatttataataacatagattctcaattcgtcaatatcctactaaaactagagggttattccttttctgtaagggaattaataattgcgattgtagcgctatatattgtgtaaataaatatatatattattaaacattatcgctcataatctatacattacctttataaatagcttataataaagtgatgatgatgaataaatactatagtggtagcaataagaatggaggtgaggaaatgccagatacaactagctctaccgtggaattcatagccattgccaaagaattccgccatgaatatgtagtggagaaatccagatttatcactaccgtatatccatgtagtaccgaagaggatgcgcaatcttttatcgcccgtatcaataaagagttttgggatgctcggcataattgtacggccttcgcattaggaccaaagcaagaacaacaacgctcgtccgataatggtgaaccatcgggcactgctggaaagcctatgctagaagtcttgaaaaaaacaggtattacaaatgtagccgttgtggtaacgcgctactttggtggcataaaacttggagctggtggattaatccgtgcatactcccactccgttgcggaaacattgcgtcttgcgccaaaagaattgcataccacaagaacacaattacaagcgattattgactatgcactatatggcacaatagaacgctatctacaagatgcccaactacattatgatgctacctttggagaaaaaatagatcttacgattttagtgccacctatcgatatagaacggatacaaaaagagctccaagacatgagtcatggagctgctacttgtaatgtattagatgctatcgaagtggtattaccactagattaagtgttcaatcaattcgtacactaactaattagttgccattatgaactaaaccagtaatgccttgattcatttcatgacgtttttccgttgtcaatggatgtggccatacgcgttctaattgttttttacgactaacaccagcattatgtgctgtcattaatctacgtgcttcccaattgcgaattgctttacttaatgttctttttactacgcccatagtagtactcactttcctagtcaatgcaactatatcaaaaatattgatgagattattaaaacaactttttatgtgcttttattctcttgatgtgtatagtatatatgacatttcttaaaaggtaaaataactattcctttattagttataaattttaattattatgatttgtgtattaaagggggattttatggacacatcgtattatcacaattttataacccttgttcaaacaggaaacatgacacaagctgcagaaattctccacattacacaaccggctttgagtaagcagttaaagtatttagaggcagaatttggagctcaactcatcaatattaaacgaggtcaacgaggttccaatttacaacttaccgatgcaggtaaaattttttatgaaaaagcacagcaattatgttctattgaagaatccacgtataatgcagtacaacagttaaattcacgtatcgaaggtacgctgcgcatcgctacctccgcatcccgttccacccccatcgtacaacaatatttgccggcattctccatgaaatatccatctgtacactttgagatttacgaaggactcatgaccaatgtcgtaaaacagctcatcagtggcagtgcagaaattggaattgctaatatccaaatggtagatactgaaaaatttgatattctcttaacccaagaggaacatctatacgcattgtttagacgcgatgtgttttggactgatcgcgaacacgataccattacctgggatgatattaaacaatgccccctctccttatctggtggatctgtaagaatgattatgcaatcatccttaacggatatggaacatctaaatgtgagcgctattacgactaccaaaacatcggccattgaatgggcatcatccggtcgtacggtagcactggtcccaatggatgccaaagaaatggtaaatcaccgcaaaatgtcacgcattaaattacctgaattttccggtgactacaaaaaagcattcataaccttaaaaggtcatgccctttcaccggtggcacaacaatttatagatttctataaggcctacgtataatacatttaccaatattgatacgaaataattacatatacacaaaaaagcaggaactggcatcgccaattcctgcttttgttatagctcgactatgattgatgtacggcaccaataatatcagtaatactgtttagattatatcgttccacataatcgcccatttcacgagcaatacgagaaatagcggttggatcaaccatcgtagcggtaccaacttgtacggcctgagcaccagccatcataaattcgatagcatcagtaccactcatgataccaccaagtcctataataggaatagtaacgcctttatagacttgatgaaccatgcgaagcgccacaggttttactgctggaccagatagaccaccataaatattacctaacaatggtttgcgacggtgaatatcaatagccatgcctaacaatgtattaatgaggctgaccccattaccaccaccggcttctacagcctttgcaatttccacgatatctgttacatttggtgaaagttttacaataaccggcttatcggttactttacgaaccgctttagttacttgttcaacaacctttgggtctacgccaaatgccataccttcactctctacatttggacatgatacattgacttcaaggcctgcaataccatccacagatagtgtttctgccatccaagcaaattcctctactgtaccagcagacatattagctagtagcggtacatcatatttcttaagttctggcaaaatatccgtaacaaaatgctctgcccctggattctcaaggccaatgcagttcaatacaccagatggagtttctgcaatacgagggcccggattaccatgacgacctttaggcgttaatcctttcacagagatagcccccacctcattactaaggtctagataaccagcgtattcaggaccatttccaaaggtaccagatgcagcgataataggatttttcatcttaataccacaataatctatggcgagttttggatttggtgtaacggtgttatttaaatcgcgttcactcattaaaagaacacctcctcagctgggaatacaggaccatctttacaaaccttatagcgcttaccacctacgccatcacaagcacagcctaaacaaccacctgtaccacagcccatccgttcttctaaggacacttggcaaggtacattgagctctttagccacttgagccacacctttcatcatcggtgtagggccacaagtcataacggaagtgaatgtattagaattaattagttcaggcataatagctgttgggaacccctttgttcctacactgccatcatctgttgtgatatgaacctgtacagctgtatccttgaacaaatcagcccagaaggtttcgctttcatttctaaagcccaagataacgtgtgcagactcgccatcttgtaaatgggacgcaatacaaagcatcggtgcaataccaacgccaccgccaacgagaagcatattctcagatgttacaaatggttcgcccaacgggcctaaacaatctaatgtatcaccaggcacgaggcgagtcataatatccgtccccttacctacgacacggtacaaaagggtaatggtacccttttgtgcatcaaatccagcatagctaatagggcgacgcaataatggcgccgtagagtccgctacgcgaacattacaaaactgccctacctttgcttctgctgcttgttttggtgcgtgaatatccataatccacacatcagagcctatttgctcattgcgaacgacttcgccctgttctacatagccactcatggtattactccaattcaaaatcttgtaatgcttctacattgtagttagcgtcatctttacggtttgctacaacgcgcaatacttcacgagctgtatcaagacttgttaagcatggtgtacccatttctacagcgagacggcgcaattggaaaccttcacgttcaggccgtttaccagctgtcaatgtattaagtacgagatccaccttatcttggcgaatgtggtcagcacagttgtcttcgccttcatggattttattaacgaccttgcaattaacaccatgttcgatgaagtatttgcctgtaccaccagtcgcttcgatgtgatagccaaggtcgatgaaaccttttgcaagttcacaagcttctgctttgtcgcggtctgctacggtcataaggattgtaccatcttctgggatacgcatgttggcaccattgatagctttaaacaatgcttcagaataggtacgaccaatacccataacttcaccagtagatttcatttcaggtccaagagcgatttctacaaggcccattttggagaaggagaataccggtgcttttacagctacatatggtttgttaggtacaagaccaagtggcaagcctaattcttttaagctttcaccaagagcaattcgagttgcacattctaccatattaatacctgtaaccttagaaataaatggtacagtacggctagaacgagggttaacttcaattacattaagttcgccatcagccacgatgtattgaatattaagaacgcccttaacattaaggccaattgcgatacgacgtgtataatctacgatttgatcgataatttcttggctcaaatgttgtgctggataaactgccatggagtcaccggagtgaacaccggcgcgttcgatttgttccatgatgccagggatacatacgtcggtaccgtcggaaatagcatcaacctctacctccataccaaccatgtaacgatcgataagaactggatgttctttggacgctactacggcttccttcatgtatacatcaagttctttatcgttgtatacgatttccatggcacgaccgcccaatacataagaaggacgaacaatcaatgggtattttaagttcttcgcagcttcttgtgcttcttcatcagatgtaacaagagcacctactggacgaggaataccaagttttgccaataattcgtcaaaacgttcacggtcttctgccatgtcgatactatctacggatgtaccgagaatttttacaccgcgtttagccaatgggcccgccaagttaatagctgtttgaccaccaaattgagcaataacgccagctggttgttctttatcaatgatttccataacatcgtccactgttaatggttcgaagtacaaggaatcagaaatatcgaagtctgtagacactgtttctgggttattattgatcataatggattggtaacccgctttacgaagtgcccaagaggaatgcacagagcagtagtcaaactctacaccttgaccgatacgaattggaccggaaccaagtactacaacggatttttcacctagtggtttaacttcgtcttcttgtgcataagcactatagtagtatggtgttttagattcgaattctgcagcacatgtatctacatatttataggttggaagaatattccattctttgcgtttcgcctttacgtcttctgccgttgtattcgcatagcgcgcaataacagtatcagggaaggaataacgtttagctagacgcaatacatcttgagtcaaaccatgttcagttaacgttttctctacattgacgatattcttgattttttcaatgaagaatgtatcgattttagtaatgtagtggattttttctacactaatccccttgcgaagtgcttcagccacaacgtagatacgttcatcatctactaaatgtaaacgttcaatcaattgttcaatggactcatgagcaattttcttaagctcaatatggtctaaaccgatttccaaggagcggatagctttcaataaagaaccttccaaagtacggtcaatagccataacttcgcctgtagccttcatttgagtgcccaatgtacgatccgccaaattgaatttttcaaatggccaacgagggaatttagttaccacatagtcaagtgttggttcgaagcacgcttttgtttcacctgttacagcattagtaatttgatccaatgtcatgcctactgcaatttttgcagccaccttcgcgattggatacccagttgctttagatgccaatgcagaggaacgggatacacgagggtttacttcgataacgatatattcgttactatctggattcaaagcgtattgtacgttacaaccaccttcgattttcaaatagcgaatgatgtcaacagatgcggtacgaagcatttggtattgaatatcgttcaatgtttggcttggtgccacaacgatggagtcacctgtatgtacgccaacagggtcgatattttccatgttacatacgatgatacagttgtctgcactatcgcgcatgacttcgtattctatttctttccaacctgcaacggaacgttccgccaagatttggtgaattggtgaaagtttcaaaccacggcgtgtgatttcatacatttcatcttcgttatgcgcaataccgccaccagtaccgcccaatgtataagcagggcggatgatgataggatagccgatgcgatttgcaaaggctacggcttcttcaaggtcattgaagatgtcggattcaggaactggttgattgatttccttcatcgcttccttgaacaattcgcgatcttctgcatgtttaatagcttctaatgtcgtaccaagcaacttaacgccatactcttcaagtacgcctgcttcggataattgaacagccatatttagacctacttggccacccaatgttgccaataagccccaagggcgttcttttttaataacttccgttacgaattcaaggctaataggttctacatatacacggtctgcaatatctgtatctgtcataattgttgcagggttagagttaaccaatactaccttatagccttcttcacgaagggaacggcacgcttgtgtaccagcatagtcaaattctgctgcttggccgataataattggaccagaaccaattacgagtactttttttgcttctgtggtcatattattttccctttctcatcatatcttcaaattcatcaaacaaatataggttatcagtaggtccaggggacgcttctggatggtattgtacggagaagattggcaattctttgtggcgcataccttctacagtaccatcattcacactgcgatgtgtgatttcaatataatcaggcaaagaagaatcatctacggcaaagccatgattttgagatgtaatatatacacggccggtacgaagatcttgtacaggatggttagaaccacggtgaccaaatttaagtttgaatgtagtgccgccgtatgcttgtgccaatacttggtgacccatgcagataccaaagattggtttcttaccaaacattttcttcacttcttctactgcataacctaaatcttgagggtctccagggccattggacaagaaaatgccatcaggattaacagcgagtacatcttctgctttagaatctgctgggaacacagttaaacggcaaccagcaagctctaaggatcgaagaatattttcttttacaccataatccattacagccacatggaattctgcatttttatcgccacgcatgccttgccattttgtagtgacgcgcataacttggtctgtaggcaaatcttgtttaaataatttttgaatatcttccatcggataatcagcacgcacaagtacgcctttcataacaccatggttacgaatagtacgagtaatagcacgcgtatctacatcatagaggcaaggaatgccatgcaaacgtaaatattcgctgaacaaaccttcattttgccaattggatgggaaatcacatagttcacctacgataaagcctttacagtatggtttaggaccttgtgtaatagcatttaatgtaccatagttaccaacgagtggatatgttaatgtaataatttgatccgcataggatgggtcagtcaaaatttcttgatatccagtcatgcctgtattaaacacaacctcgcccactgtaggagcgccgcctaataaggaaccttcaaatacggaaccatcttccagaactaatttgcctttcattataggaccacgccctccttcataacgatgttaccgtctacaacggtaagttttgctttaccagtaacaatcatgccatcaaatgggctgactttaccttttgtatagaatttatttctatctacagtccattgttctgtagtagagaatactgtaatatccgctggtttaccaacttctaacacacctgcatctagatgcatcaactcagctggacgtgtactcatgtagtacaccacttggtcgatgctaagtttatctggaccataggcattagtaataacgccagccaaggatgtttcaagcccgctaaaaccatttggagcgcagcagaattcgtggtctttttcttcgaatgcatgtggtgcatggtcagtgataatagcatcaatggtgccatcttttaaaccttctagcaatgcttgacgatgatcttcagaacgaattggcggtgccattttgaaagcaggattatattcgcgcaaatattcatcagtaaaggatagatgttggcttgttacctcacaagttacattaacccctttagcctttgcacggcgtaccatatccaccgtatttttactacttacgtgagcgatatggatatgaccacctgtcatttccgctagtaaaatatcgcgagctacggccaaatcttcagctacagctggacgcccgataacgcccatttcataagatacgaaaccttcatgcatatgaccatttttagtcaagctaatatcttctgcatggtcgataaccattttgttgaacatggaagaatattccaatgcacgacgcatgaaagcagcgctttctacatagtgaccatcatcagagtaagctacaacacctgcttccgccatatcgcctaattcagcaagttctttaccttctaggttcttggatacagcaccgatgaattctacctttactacgcctgtaagttcagcttgttttttcaaacctcttacaagagctgcattatctacaactggtgttgtattcgccatggtcacgacgcgtgtaaaaccaccagcagctgccgcttgtgtaccagaatggaaatcttcttttgcttcttgtcctggttcgcgcaaatgtgtatgaatatcgataagacccggtgctacaataagtcctgttgcatcatatacttcagcaccatctgcacttaaattttgaccgatggctgcaattttaccatctttcacgagaacgtctgctacttcatgttgttgttttgccggattgactaccgtaccatttttaataagcaagctcactaccgtcacctccatgaattgttaagtacaacacagccatacgaacggatacaccattgcgtacttgttcttgaattacggattgatcccagtaggctacatctggggaaatttcaaggccacggttcattgggcctggatgcataaccataacatcatcttttgctaggcttaatacatctttattgataccaaagatacgcgcatattcgcgatttgttggatatagagcggagtgaatgcgttctaattgaatacgaagtacattgacaacgtctgcatcttttacagcttcacgcacatcgtgatgaatggtaacacccattttttcaagctcaggatagagcatagtacgaggacctgccaagtgaacgtcggcccccattttagtaagaccgtaaacatcggagcgagctacacggctatgcataatatcgcctacaataacaacttttttaccttctaatgaacctttgcgttcaatgatggagaacatatcgagcaatgcttgtgttggatgttcatgggcaccatcgccagcattgataatgataggatcaacggcttttgttgcatagagaggagccccttctgcactgctgcgcattacgatggcatccgtccccatataggacaatgttaataatgtatcgcggaagctttcacccttacccatagaggaaccacttggtgtaatattgattacatctgcccctaaatatttacctgctagttcaaaagaactacgcgtacgtgtactaggttccatgaatagattgataatcgccttacctttcaaataagggatttttttgtcatcagacaaaacaaccttcttcatctttttcgctacatctagaattaattttatctcttcaggtgtagcatgttgtaaccctaacaaatgtttgccatgcaagctcacttgtcccatgattgcctcctaaccgtataacaaaaaagacctcttgccccagggcaaaaggtcgaatagtttgcacaaagaagcccttgagggcgcttcaactatatgtccttttttagcctctctggaccaatttaaaagggattttgtaatgctacagtatctcgtactgtatattgcacttatctctattcattgtactgaaattacctgtgaaagtcaatgtaattcccatgaagaaacacaaatcggatgcctcaaaaggcatccgatttaatatgtaaatccaccgattcgtttactgttgttttcttgtcaactgatcaatagatacagcattttgtgtagtatcttcatcttggtcgacagatgtattaacatcatttagctcagcaaagctacgacgtttaccaccttgtgctgcaatacgcgctgcttcacgttcttctgccaatttttgacgtgcaatttctgcgtttcgcttagcgataatttgtcgttgtgcagctaagcggatttcttcagcccgttgagctgcttttttctgagcttcccgttgaatatcagcacgacggcgtgcctctttggcttgttcttgagcaatttcgtattcacggtaccgtttttctgccaattggcgagcttcttcggcttttctagccgcttctgcttgttccttcgcaatccgttcacgctctgctttacgtgccgcttctgcagcgcgattttcttcgcggatgcgagcttcctcagcttgtcgagcggcttccgcaatacgttctgcttccgtaattcttgcaacttcagccttacgagcctcttcggcacggcgtgcttcttcggctttacgcgcttcttcggcccgttttgcttcctctgcaatacgacgttcttcggctttacgcgcttcttcttgagcttttgcaatagctgctaggcgctcttcctcagctttacgtgccgcttcttgtcgagccatttcggccttgcgcaatgcttcctgacgagcttcttcggcttttctagcctcatcagcgcgttttgcttcggctgcaattcgatcagcctctgctttggcttctgcagccttgcgtttttcctcggcctgacgagccgcctcttgacgcgccgcttctgcttttctagccgcttcttggcgttctgcttcgtttttagccgcttgttctgccgctttgtgttctgcctctatgcgtgcagcctcagctcgttgttcagccaaaatgcgttcttcttcagccttacgctgcgcttctaaacgttgtgcttctaattttgctgcatattcacgagctttttgctcggctgcttctcgagcagcttgctcacgttctgctttttcacgagctgcttgttcggctgcgatgcgtgctgcctctgctttttgagcatcagccttggctttttgttcggctgcaatacgagccgcttcagccttagccgcatcatctttcgccttttgctctgctgcaatgcgtgctgcttccgctttttgggcatcagccttagctttttgttcagccaattgtcgatcagcttccgctttagcacgtgctcgttcagcagctgcatcggcttttgccttgagtttagcttgttcctctgcatctcgtttatcaagctcagcctgtctatcttgagctgctttatgagcagcagctgccttttcagccgctaatttagctgcctctgctaattgatgagcttgttcttctttttgcgttttcgctgctacatatttttcttcaatagccaccttcttagctgcttcggctgcttctttttgtgcctctgcttctaatgcacgctgaccagcttcattagtagccaatacgcgcgcatattgagggtttgctaacgcttctggaatcagtaaaaaacgaactggtaaattcgaagcaccagccggcatgaaatcgatggtcaacgtatcgccaccgtaatagttccccatgtatcgagaatctaatacagtattatgacctaatgccattaaaccatcatcaccaccgatatgataggtcatgctttcactaggagccttctgccaacgacgttgtgctttcacagtaaaggaaccagaataaccgccgcctaacggattgaaatagaggcggaaagggtcctcgccacttgtaggaattttaacggtataagaaataccatagttccctgcgtccttaacataggctttattatcgagctcatccacgccctctacaaaacggtcttctctatcattgcccagttccacataggcgccacctaatgtggtgttatattcttttgttactgccatttcgcgctcagcaccggtgaaagtaccacgcaaccgcacatggtctataggtaaattattcacccaatacgaggactcaatagagttcagattcataggaatcatcataacccgtgcaaatacaggagcactcgtttgcaaatctacgatgcctgtaaataaagcatctttaggtattggggaatgttctaaatcggtaaatacgagttgacgacttttgggaggcatcaccaaggaatacaatggtttatccgtcaatggttgctctaattcctttcgtgataaatcgcggcccgccgcaaaataatctgatgtggcgatggattttagttcacggaacacggcaatgccatttggttcattacctgtattctccaagataatggcaatcttatgaggttcagccatttcatttacatggtaaaagtagatacgccctttcccattaatgctaccagcacttaaaacgccgcctacgggacctacatattcaggactatcagataatagcaatgtatccttctgcgcttgtaattccgctggtaatggagtaaacgaaaaatatcctatggagttcaaatcaatatcgcttgctgcatgacctgttaatgctcccataactgctaacatcgttgctagcttatatgttttcttaaataacataatattaaacctcttccagccccataggatcatatgtaagggctaatgcttctaactttttcaaacgatgtccaatacctgatttagataaggtaccattcatcatttcttctaattcttttaaacttgcttccggattattccagcgcaatctagctacaattttcaatttatccggcaatgcatcaatacctatatgctcatccaatatacggatggctttcacttgacgtaccgctgcatctacggttttttgtaaatttgcagtctcacaatttacctgtcgattgatctgattacgaacggtcttcatgatgcgtacattttcaaattccatcaatgccgattgagcacccatgacctgtaaacaatttgttaccgcatcgccttctttaagatataccacatattcttctttacgctctgtcagacctgcatgaatgtgaaataatttcaatacatatacaatttctcgtgcaaaagcttcattgcccgtcataaactcaagatggtaatcactttgtggtttattaacggatccgcctcctaaaaaagcgccgcgcaagaatgcgcgtcgcgcctccattgagtgtaaccacttccgtggcaactgctcggtgacaggccacagtgccaaatcttctaaggcttgacgcccctcttgtgatggatccaccgttagtgtatacatattcttttttcgcaaatttaaaccttggcgcaccataacatgggtcggcaattcgtattgttttttaagtatgcctagcaaacgtctagccaccgcattattagcagtggctagtcgtataccgatagctcccctcataccgagcaataaggaaccacccatgcgcaataagcaggatgcttcaatcttcatggccacatcggtatccgtttcaggctcataggcacataattcattttttacatcttctgcaaaagacataggttttcctttctaatgatcagcacggcgtaaataatattctaatacccgtggttccatatctgatttcatagcatatatgatatccataaggaccttacctaaacgttctggatcatgaatagccggtttttcttgactaatgagcgttgctctaaccgtgcgaattcccatgtcttgtaaacgtttagaatcgatggccacaggttctgaaccaactgcgctatactgttctaccatttgaattggcaaaggtccatcattggcgagaaccgtatcgatgatgcctcctccactatggtcgatgatagcttgtacgtgatcagccaatgtgtagccagacgtttcaccaggttgtgtcattacattggcaatgtaaattttattggccttactagcgcgcacatggtccgcgattttgtcggtcaataaattaggaatgatactcgtatagagactaccaggccctaatatgataacatctgcttcatcaatggcgcgcaatgcagcgccttctggttttggatgttcaggactactaaatacgcgtttaatcttctttcctgcatgtggaatattactttcaccatccacaattgtgccatcaatgagttcagcactgagttgaataaattctgtagacgacggaatgacacgaccgcggacacgcaataatttactagccgcttcgagggcctcctctatatcgccatcataaacctgtgccaacgcagtgataaagagattcccaaagctatgaccagaaagttcattgtccccttcaaaacgatagcgaaaaagattttccataaccccttcttgttctgcaagggctacaaggcagttgcgcaaatcgccaggtgcaatcattttaaaatcttctcgcaagcgacccgaagatccaccatcatcagcaacagtaacgatagccgataaattagatgtgtgagctttcaaaccacgcaataaattggataagcccgtaccaccaccaataacgacgattttaggacctttatcgaggcggatattttgaaagataatatccgataccttgctggatgggtctggtaaaacagcacgaatgatagttttaatcaccttgctggtaccaactaaaattaaaactgccgcaatgccaatgagtactgcgcccactaaaatcaatacattgtaattataatatcccgttaaggaataagaataggcaagaactatatcctctatatacgataaccattgatagttaaataatagtgaaatgcctatgattaataagcctacccctaagctatagagagcaagccaacgttttatattaaggcccgggattaaccaccggaaccaacgttttcgtaacatataatccccttttaatcccctagatctgcttgatgtggattaaaatcttcttccacattatttttcatcatatcgcggtgttcaacagtaacgcgatatcctttttctaataaatgagaatacaaagcctctgccattgcaacggagcggtgcataccacctgtacatccaacggctacaataaattgtgctttcccttccttctcataattaggcacaaggaaatccatggtattaaaatagtgtgttttaaattcatccgttacgtcaaaggagtgaatatagtcattaacgacctgtacacgtcccgttttatgacgatattcaggaatatagaacggatttggcaagaaacgaacgtcccaaatcatatctgcatctaatggtaagccgtatttaaagccaaaactcacaacagttacggacatgccgtgtttatccgccacttgagtaaagcgttttttcaagtattcctttaaggatgcggttttcatatccgttgtatcgataatataatccgctttatggcgcacagaatctagaatttgacgttcttttcttagacctgttgtaatgcgcccgcttggtgccaatggatgactacggcgagattctttataacggcgaatcaaggtttcatcactagcatccataaatacaatttcataatctaccttcatctcttttaaattctccaaggatgcagatagagcctcaaaaaattcaccaccgcgaatatcgacaacgagagctacgcgattagtacgatccccaccttggcgacagatttcactcagtttcggaattaatacaggcggaatattatctacgcaaagatagcccatatcttctaacgcctgtaacacctgtgtttttccagcaccagacatgccagttacgattaataaacgaaatgcttccataccttactccattataataaatgttcttcaatccaatgagctacgccatcttcattatgatgtccacacacttcacgggccaccgattttacatgatctacagcattttcaacggctactgagtaccccgttttagataacatagatatatcattctctgcattaccaaaggaaacgatattctcaaggctaattccatgttgctgtgctaactgctttaacgcatcgcccttagatacatgaggtgcaatgatttctaaaaaatccttttggctccgcactaacgtagccgtatcgcctacaataggcgtcaatgtatcaatgatagaatctatgtttttaacagtatctatagcaatcaatttattcggctctcgtgaaagttcatacaacgaatcgcctaaaaattcagctttagcccctgtttgacgttcatatagattagattgccaatcctcatgatgacacaatagatgatcatctacatacgattgaatatgccaactatattgactagccaatttccaaatacgctgtaccgtgcctaatggcacagtccgttcaaatagcttatgtccagattctaactcttggataagacctccagaaaacaaaatcatcggtacattaccaagctgtaacgacatacctactggttttgccgtttgatacatacggcccgtagcaatggttatacgaacgcctttatcttgtaatcgatgcaatacatccttagtatactctgacaccgtattatcactacgcaacaatgtctcatcacaatcgatagccaccatttgaatatgtgaaaaagaaggattcattaatagacctccttgtataattactgtatttatttattataccatttatgaggggtacaaaaaaagagactcccgaaggagtccctttcatatttgtaactatcaaattagaatttgtagttaagttctgcacggtagaagtcaccaagatctttaccgttgttttgagtttgtttccagtcgaagccgtagtatgcggacaagccaacatttggttgtaatgcatagtcaacggaagccatccagcctttagcgttttggatgtatttgtggttccaagtggaatcgaatacaggtgcgttttctttagcgttgaagtattgacctttaacgtcccaagaaccttttttagcaatgctgtagtcgccaaaaccaatacctgcagtccaagctgtagaatctttaactttagaatcttttagccattcgccaccaacccaaactttatcgaagttagtgttagcattgaagccatatacgtttttgtaaacgttatatttagcgctaccaccatcatcagctttaacacctaaagctttgctatcgttgaaacgtgcgtagaaaccgcctacatcagcgtgtttacctactttaccattcaagcctaagtatactacttcagcgttagcatctttatctacatcagcgccagctgtagttttcacattagcagaagtcaagtaaccataagcagcttggaaagcaactttatcgttaccagcattgaattgagcaccatcgaatgtggagtcatatgctaagccattaccaaatgtttggttataacgaccagctttaacggatacgcgttcaccgaatttatggtttacgtatgcacggtcaagtttaacattagtagagccattagcatcaccaaactcataagcacctttaatacgagcaactgcttcagtgcgatcgtttacttttgcattgaattggatacgagcacggccatcagttttagaggaagcatgttcttggtcttcccatttaatacgcatatcgccagttacttttacgttaccaacgcggtcttctaaacgagctacacgaacgcccaagttgttcaattcgttggagaattcatcagccaaacggttgatcatagcttgttgttcagcgttagcgcggtcttggttagccatagctttagctaccatttgagccatttcgtaacgagtgatatcgttttggcctttgaaagtgccatctggataaccgttaacgataccagcagctgctaattgagaaactgcttggtatgcccaagaatcgggagttacatcggagaatgggttagctgcgaatgcagtagttacacccaaaactgctgttgctgcaaagattgctgcgaattgttttttcatagttgaattccttctttctgaaaaataagaataaaattgtttcacaagttgcgatttacaattcattctaatttcaagatttagaattctcttgggagtgtccacgtttcctcaccataattcttcatcgagatttcagtatgttttgcttaccgcctcttgttgccatgatattagcacgaagaaattttgatgtaaacccttttttctcacttacgttctcatttaaaaaaatttattttttaaaatcttggaaaagttagattttatctaatttttttacaactcaaaaaaatcaaaattttatacaaatttattcattttttcttataatgatatttattctcaccactattattaaattgtacttattaaatatatttcaactatttttatttattaatatagcttcatgtttgagtcattttatactcatactacatattgcatgtaaccattttcacatacaaaaaggagccctctaaggaggactcctttatatatactattatatgttattaagagatggttttcataatagtgttatttgattatcaattagaatttgtagttaagttctgcacgatagaaatcggataagtctttaccgctttggtctttagagttgaaaccataaccagcgcttaagcctacgttatcttgtacagcgtaatcaactgttgctacataacctttataaccgttatttgtattagttaagtcatatgcttgatcccaagtggagcttacgattggtgcattagctttttggttgaagtattgacctttcacatcccaagtacctttcttagcgatgtcgtagttaccataacctacaccagctgtccaagcttgagaattagctacgtcagaagctttcaaccattcaccaccaacccatactttatctttgcggaagtctgcattgaagccgtatacgttttgatgatcagtagcaacgctagcgccattatgttctaatttaccgctagacaatctggagtagaaaccaccaacagaggattcttgaccgattttgcctttaacgcctacataagatacagatgggttatcagatttagcattgccttctgcagcgccttccatcatataaccataagcaccttgtacttggattttatcgttaccaacgttcaattgagcaccgtcgaatgtatcatcgtacattaaaccgccaccaattgtttggttgaaacgaccagccttagcggatacgttttgaccaaatctgtgatctacatatgcacggtcaattttagcagttgtaccattggaagcatcaccgaattcataaccacctttaacacgaactactgcatcagttttgtcatttacctttgcattgaattgaacacgagcacggccatcagttaaagatttgctaccatctttgtaaacgcctttgtcttcagatccttgataacggatacgagcatcaccagtaacttttacattacccacacggtcttccaatttggaaacgcgtacgcccaagttgttcaattcattggagaattcatctgccaaacgattaatcattgcttgttgttctgcattagctttatcttggttagccattgctttagctaccatttgagccatttcgtaacgagtgatatcgttttgacctttgaaagtaccatctgggtaaccattaacgatgccagctgctgctaattgagatacagcttggtatgcccaagaatcaggagttacatcggagaatggattagctgcgaatgcgcttgttacacctaaaagagctgttgctgcaaatactgctgcgaattgttttttcataataaattccttctttctgatatagtctttttgactaacaaatttagaaaaaaatatatagtatcagaagactgtacatttagttatgatctatataagaacatcctgatgagtatccacgtttcctcttcttctgttcttgtatatcaccacaactgggtgtgttgtctttctgtgatgtcaatatacatccggtcaagaaatttgtaaagcattttatacaattaaatatgatgaaatttctttcatgaaataattttatacaacaaaagcagtatttatctatatttatcaaaattaaattttataaaatttcattttatttaagtataaaacaatgtattttaagctatcatactatgccaattaatatgcaaaactaataaatatagttttaattaatcagttataataaaaaataagacctatcatctctgatagatcttatttcataagcattaattagaatttaagaacgtacattacaatttagtaatatacgttctcatataaagcattgtagtattgagctgtaacacgtaagaccttagatttctatatatttttattatctgttatagggcatattctacaaaacctagtacatgatctacaggtacaggtccgataaagcgactatcactcgagtgatttcgattatcccccattacaaaaatatgtccttcaggtactacaacaggtgtagaacggctatagttcattgttggatcttttgtataaggttcttgtaactcttctccattacgccatacgtgaccatctttaaactccaatgtatcaccaggtctaccaatcacacgttttacccacacatcatttgtttgagcagatttatcgataacactaacatagttcatcaatggttctttcacatcatccgtccatgtacgttcacggttcacacggctatcaatgataacgatttgaccataatcaggtacatcacgcataatatgttgccacttggtaacgattaaatattgaccattatgtaatgtatcctccatggattcaccggatactcgtgttggttgtacgataaaaatatgaatgaccattgcaataactaacgccaatacaatggcatatatccaatctaatgtttcttttacaaatttattattcattagagcccccttaatgtccactcttagtaaaacgtccaccaaatacatcgtgtacatcttgaatggttataaatgctgatggatccacttcatatacagcatccttcaaacgcgtaatctctaaacgagttacaactgaatacaatgcatgcttaggtgttttcaaataaccaccttcaccatataatatggtaacgcctcgatttagttttgcatttaatgtatccgcaattttctctgaattctctgcatcagtaataatcataacgccctttgattcctcaaggcctgtaattgtaatatcgatcattttataggcgataaaataggctactaaggaatacatagcactatcccaactatatacaaatccggcagcccctaagatgactaaattcatggccattacaatctcgcctacagaaaatgtagttcgtttatcaaaaataatagctacgatttccgacccatctaagcagcccccattacgtataataaggcctacgccaataccaagtatgataccaccaaaaatggcacctaaaaaaggatttgttgtaatcggagtaaattcatgggcaaaggatgaaaatatggccatccaaacgatagagaacaatgtagatatggtgaataccttgccattaatgcgatagccaatatacacgaatggaatattaattaatactacaaatatactaaacgatatccccgtaagttcagctgtcatcaaagatataccaacaacgccaccatcgatgatattatttggcactaaaaatagatctaggcccaccgtataaatcagggcccctataatcatccaaatacatcgcagtagtatactggaccaatgtatcttttttatcacattactcatgtgcatctccttcattatataattttttaattgctgctaaacgtttagcttctaaatcctcttctactttacagtcttgaagtttattataattctcttccttcaattgtttagtatatcgcttaccaatgacataggctgttaagtcatctactggttcaggtggaaattgcatgccttttggtacgaatctacgccaaccggtaggtggattatattgccaatacaattttcgagcctcttcagtactatgtgattcatcgatcaaactcgtcgtaattttatgattgcgcccaatttgttgtatagatggatacaaatgcttatgattggtaccattaccacatacgatatgatgtataccaagataagtacttaatatactttcaaaggaactattaaatgtcttagtttctacaatggttcgatatattagctcacctgcttgtgaaagaatagctacaccggtcttttcattccccggatcaacagcggctatatacgatatattattcatactattttcctcattcctcaatacaatagttatattttatcacaaaataaaagacctatgtattaaatcttaatacataggccatttatatagaaactaatttgattttataagtttacccgtatctgtcatctgtgtaatacgcaatttaatatgtacagggccagatgaatatgtatcaccatcggcatacgcctctacatataccttgccatgcagcatgctaatgcgacgtatcgccgaaaataattcatctccaggtattgtaccaatatcaccggacaacgaatctggtataacccctttagacttagcctcttcattgacttgtttcaagaaacgaagcatattgacttgagcattactaccaccatcgataacagacgtagcaatcacgtcacctgatttataaataaattgttgtggatacacgtgaatcgtcgcaactgctggttcaccagcaatgatattaccagctgccaccacttggataaccataggcgttttagattcttcaattttagaaatggcaacctctatattttgacggtctacatatacaacagattcaccatgatcttcaacacctaagcgacgaagtacgagcttatttgtatcttccacaatactattaactgcatcacgcgcttcattaggagataaaccattacgcactactgcctgtgctaataattggtcgacttggaataaaatcgttccttctctaagatgaataatccccgtttttaactcttcttgtgttttctgcaagtcggcaatatgtttttccatactagcccgtgtagcttccaaggcagctaattttttagaggcctcatcataggaggcttgtaatgcagataattctgcctctgtagcaacctttgcagcctctgcatcagctagttcttgacggctttgttcaacctctttgcgaattgtttcaatctcagccatacggtccgctaattcttttttattagcttccaatagggcttgaccttgttctaattcagcatttttagcagctacctctgctgttagctgattcatatctgcccgcaattgatccatcccaaaaagcgcagtacgtacgctttgcgatgtaattgtaagaacaccaaccgttgcagctgcaacgagtagacctgttacaatcgttacaataatcgatgtatgcttaggacgcaatccaaagagggacattctacgcttaccgacctttgtccctaatttatcacccatataggcaataagcccgcccatgatagcgataataacgagaatctttaatcctacaagcatggtgtccctcctttcaaaataaattgtaatccaacatactatctattagcgtgaaacacgccaatttaaatataatccggcaatgatacctaatgtatcaggaatcattgctgccatccacgttggtaatgcaccacccttaccaagagctccggcaaaggtcatgacaccatagtaaataaagataattaaaatactgataccaaatccgatagacgaactagacctttgtttttgcaagcccaacggtgcgcctactaaggcaaatacaaagcttgccaacggaatggtaaaacgttgatacatttccatttctaacttattagaatttgtatatgcagctttatatgctttaatttgatgacgcaattctttaatcgtcaattcttctggtttacgttgatcttgttgtacttcatttggtgaagatttaattggcaatacttgttctttaaacttcattgtccgctctacaccttcaccggccgatacgtcatagattataccgctatgcatgacccatacttggccattccattcagcattttccgcattttctacctgttgtagttcacctttgtcattgaattgttgcaccgtaatcatgcttagttttttactttcactatcatagtgcttagcatacatcaatgtacttaggttgtcaccattcatagattttagcacaatatgattttgcgtttgtggcgatgcattcttcataatttcttcgcgcacaatggtttgatacatattgtttgtacgtggtacgacaaattcattaaatgctacggcaccaatagaaataagcaacgctaaaatatatacaggcattgcaagtcgtaaaaaacttaggccaccagccctcataactacgatttcactagtactacttagtctgctgaaagccatcagtgaaccaagcaatacagacataggaaatgtcagtaaaataatgcttggcatcgctaaaaagaaggctttcataacgagcagtagcggagcaccatattctgttatatattgagcaatgcggaataacgtacctgtaccaatgaaaatactggtaaaagcaaataccccaaataggaatggacctacaaaggcttttaaaatatatttatctaataagcgcatggtccctcctataatttaaaattgttacctaaataatgttcacgagcgattgggttattggcaatttcatcaggcgtaccttccaataagattttacctgtgcttagaatatatgccttatcaacaatacctaatgtttctcgtacattatggtctgtaataagaatgccgattcctctattttttacttgtaaaataatttgttggatatcggcaactgcaattgggtctacgccggcaaatggttcatccaataagataaagttcggttctaaagccaaacagcgggcaatctctacacgccgccgttcaccaccggatagttgcatccccttacgatctcgcacatgaccaatattaaattcatcaataagagagtttacaatttgatcgatttcatcacgatttttatttgtcgtttccaacatggcacgaatattttcctcaacagtcatagatctaaaaatcgatgcctcttggggtaaataaccaatgccttctgctgcccgcttatacatcggtaacatcgtgatatccttaccatcaactgtaataatacctgtcgtcggtttttcaatgcctacaatcatgtagaacgatgtagtcttcccagccccattaggccccaatagcccaacgacttgtcctttttcaacatgaagacttacaccatctactacattccgaccattaaatgttttgactaggttcttagtttctatatacatacattaatccttactagttcggtgtgataactaatgtactacgtccgcctaatgtttccgcagagttatccttcaagtacaattttaactcaggagcattcaacacattgccattttgtactgcatgtgctgagccagtaagcaataccaccccatcattttgattaggcgtttgcgtatatgtagcacgatctgccgaaccagatacatttttatctggattattaaatgtcacgccaccttgtgcaacggcgcgaatctctttcaaccaaccttctacttggttacctgtcaatgtagtgccttctgcaattaatttagcattccccagtaccttaccatattcagtatcagagttgtactcaacagagtcaccaaagatttggcgatcatcccgttgcaaatgaacatccccttctgcactgaattggttatcatttacactatgtacagattgtgcggacatggacatattatcaccaatcaaggaaacaccaccttctagtgatgcttcacgagttttagtattgtaccatccattcgcaccagtcatcgttttatcttgttgtgtaattactacattaccagatgcctctgcacgacctgtattaccatcataggataatgtatccgcactaatggtcaacggaccttcattggcagcccaagcggtaacagatagcatcatcattgctgagattacagctaatcccatatattttttcttattcatcgcaattcctcaactttactttttcgtcaatttagcatgaccaatcgctttgatttgtttcaacgacatattaccttctaacttatcaccagttaaggtaatatcttttgaatcataagtgaaagccgtttttgatgtaagcattttagttttgttatcaaaatgtaatgcatcggtcttaaaattagccccttccgtattggtagctgttacaccaccatcaatatcaagggaactatgatcgccagacaatacagcatgaggtgctgtaatcgtagttgtcacatcatcttgatagaaaaggcccttcaaattagtgagtacaatcgattttgaacgtgggtcatactcaattttctctgctgatagggcccataccaacttaccatctttctcttcttggagctcagccccttggaaattcaccagttgtccattattagtccctttagaagaagaatctccagagtcatgcaaaataaacgcgattagaccaactagagcaatgacgatagccacgacaatagcgattaattttttattgtttttcatgtgctctctcccgaatctctagtttcttatcataatcaacgatttcgctcatcttagtcatccaccgatgttggaaccaaatccactcatccggatgctcacgaataaagtcttctgttacgcgtacacattcttctgtcaacgtatacatatctacatcatcatcaccactattattgtaatgtaatggtggcaaaatatgaacaatatgtccgccttcgggctttctagatgcaaaaattggcactacgggagaaccaaattttttagcaaatgtagccggccctacaacggcagaagaaggttgccctaaaaacggaaccggtaacccatgaatatatccatcttgatcggctaagaagcccaacaatttcttctttttcaatgcttttgcagcagaaactatttcattacccccgctggcaaacacatcgagacccaccatttcacgatattcattcataaagcgtgtaaattgagcattaggttgtttcttaacaatagttgtagatggatacccatgtgcagctaacgcagcccccatccattcccagttgcctacatgccccgtaagaacaatgacgcctttatcttctttaatagcattatccaaatgctctacaccgcgcatttcgatatgctcattaataaatttcttagtcaaattcggcatatacagaatttccataacactgcggcctaggtttttgaataatttttcaattaaagcctctgcctgttcgtcattcatattcatgccaatttttatatttttaatgcctcttagcttttgcttttttgcaataactccatacaggggtcctaagctagcacctatgagcaaaatgagcttatacggcagtcgacatacaagccaactgattcccttaacgacatggtattgccattcattattcattctgctcacctcctttattgaccatggttatgagcctccatagcatagtcttttacgactgaatcccacatgttttgagattttaaaatatattcaacagcatctcgcacggcaccagatccaccattgtgatttgatacaaattgagctaattccttaacctcagccgccgcatcttgaggagccatcggcaagcctacgagagataaagcccctaggtcatttaaatcatcacccatataagctatatgagccaactcaatatgatggctttcacatagagaacgtagagcctccgttttattagcatgccccatcaataaagcatcaaattttaattccttagcacgccgttccaccataggcgatgtgcgagccgttataatgcctagtgaaatccctgctttatgagcagcggctagacctaatccgtctcttgcagagaaggcctttatttcttcaccactcgatgtatagattaattttccatctgttaatacaccatcaacatcgaggattatccacttaatattcattacacaatgcctcgacgaagtaagtctgtaatgtgaacaatacccattgcatggccttcttcatctactacaggtagtactgtaataggacgaggttgattcttttccatcacatggagtgcctcagcagccaatttatcctttgtaatagtacgtggcatattcgtcatcatatcttcaactggccactctaagaaattgctaccagaatcaaggccacgacgcacatcaccatcagttacaagaccgattaggtgaccatcttcatcgataacgctagtggcaccaagtcctttttccgtcattacaaacaatgcatctcgaacagttgcccctttgtgtacaactggattatcttcaccgccatgcatgatattttcaacagtcaacaataaacgtcttccaagtgagccacctggatgaaaaacagcgaagttttccggcgtaaaatgatgacgctctaataaacatacagccaaagcatcgcccaaggccaatgctactgttgtacttgtagttggtgccaatcctaacggacatgcttcgcgttcaacttgcgccaataatacaacatcggaatttttagccaatgtagattcaggtttccctacaacgcaaatcaatttagcacctatgcggcgcaaagaaggcaaaatactaatgatttcacctgtttccccactattagaaaaggcaagtaccacatcatcttcagtaatcatacctagatcgccatgaacaccttcccctgggtgcataaataatgctggtgtacctgtactcgccaatgtagcagcaatcttgcgaccaatatgtccagatttacccatgcccgtacatacaacacgacctttgcatgcaagaatcatgttaacagcatttacaaaactttgatctaatgttgttattaactgttctatcgcttgtgcttcctcatgaagcacttgagcagcctgttctaaaatatccaatactatcgccccttatcgttttacgattttatcaatagctactaagtcttttaataaatcttcaaattgatttaaatacaccatgtttggaccatcggaaagcgcttcttcaggattatcatgtacttcaaagaataaaccatctacaccactagcgacagcggcacgtgctaaatttggcacgaattctcgatttccactagattttgtaccagccccacctggtaattgtacgctatgagtagcgtcaaaaattactggataatcaaaggaacgcataatagggaatgatctcatatctacaacgagattattatagccaaagctaaaaccacgttctgtaagcataagattttcattgcccgattctttcattttattaagaacattctccatatcttttggagccataaattgacctttttttacatttacgcatttgcctgttttagcagcgccgtaaactaaatctgtttgacggcacaaaaaggctgggatttgaagaatatccaacacttctgcagcaggttcaatttgttcaatagaatggatgtcgctaacaactggtacattcaattcttttttgatagatgctaaaatttttagtccttcttctagacctggaccacggaaagaattaaagctagaccgattagctttatcaaaggaagctttaaatacataaggaatgccaaggcgttcacaaattgctttagcctctttaccaattgccaatgtgcggtcgtaatcttcaattacgcatggacctgctaatacaaataggcctttgccgccaccaattgtcatattaccaacatttactgttttcatttatttctcctcttgctcgaatattgcatttacacgagctaagtcttctggtgtatccacaccaacaaatcgtttatctgtagtaatgacgcgaatggaaaatccattttccaacgctctcaactgttctaacgactctgtttgctctgctgcagtaggcttcatttttgcatagtctaataaaaattgacgacgatatgcataaataccaatatgctttaaaggagcattaacaaaatcatgacgtggatatggaattaaagagcgagaaaaatacatcgcatcatttcgtttattaagtataaccttcaccgcagaagggtcatcatactcatcttctaataaaggggttgctactgtagccatttgtagatgtttatcatcttcaaaaagcgctcctaactgatctattaaatgcgcatcaatcataggttcatcaccttgtacattgatgataacatctaggtcattatattgttgtgctacttcagctaatcggtcagttccagtcggatgattggcatcagtcataacaaccgtaccaccaaaagatttaaccgcatcatatacgcgttgatcatcagtagccacaataacaacttgtggtctcttcgcctgtgtaacacgttcataaacgcgttgaatcataggtttacccgcgatatctgccaaaggttttcctggcaatctcgtggaaccaaatcgagctggaatcacacaaccaatattcacaataaaaccccatttcttttatttgcgtatcttattattatacactaaatctctaaattttctatgaattcttgttttccagagaggaactcaatacctatggatagcactagaatcggtattttcaagtcttcaattgtatgcaactgacttaatttaacagcatctttttcagtaatcataatcgccttggcttgatgagcaaaagcttgcttccaaatttctactacatcatcatccgaaaaatcatgatgatcaccaaaacccattgtatgtactacgtcgtaaccacagccttccagtgtcttcgtaaaggatttaggattgccgataccacttacggccataataggtaaatcgctatcagtaccaataggatgtccttcatcaccattagcccatgcctcaagtgtatagactgcacgtggtttatgaacggtctcataaacaggcttttgtggcgccatccgagctaatcgttttctaagtgctgcaaccaatcctggatcaacttgatctacttttgtaagcacaataatatcagctcgtgcaaggccctccataggctcacgtaataatcctcttggcaatacatgttcatagccaaaaggattcgatgcatcgattaatacgatatccttatctcgatgcaacgctcgatgttgaaaaccgtcatccattacaagataatcagcacctaactcttcaattgctatacgtgccgattctatacgattacgaccaataattacactagattttggtagcactttcgctaatagccaagcctcatctccactttcctcaggctctactaaaatagatccatgcttggaaataattgtattttgactattatctttagctctataaccacggctcaatacagttggatgaaagcctttctgtcctaaaatatcacagataagtctaaccattggagttttaccagttccaccagctgttatattaccaacactaattacaggtaccgatacttttacaacacctttatttgcatcaaactttgcgttacgcatagtaacagcttttttataccccttactaagaagtgataacccagccctggctacatcgcctaagatagattgatcttcgccgcttacaatgctcttaaaaatatcttcaccattcatagtaggcacctccttccgtatcgattacaccaatatttcttaaggaataatatgatgtgattcaaatagttgacgtaattcttgcgtattgcgacgcgttgcaccacgattttcacggataatatctaagcaattctgccccatttctttcgctaattcagggtgtttacagagatgtaaaatcatagtggttaaatctttttgatttttaacttgctcacatgcatgtctagaatgtaagagattaaaaatttccttaaaattaaacatatgcgggcccacaataataggttttccatgagcagctggttctagaatattgtgcccccctgttttaacaagagaaccacctacgaaaatgatatcgcctaagctgtataaacgaccaagttcccctattgtatcaagcactactacaggaatttccttatggacaggctccgtcatatcgctgcgacaaatggcttccaaaccataacgttttgctaaggtctgtacatcatggcctctataaatctcacgaggcgcaataagtaatcttgcattaggatactctactaaaacctgtttaaaagattcaaatacggcttcatcttcacccttgtgtgtactgcctgccacgataataggatgattatgaccaaatccaaattcgtctaacaaggcttgcttttcttcttcggatactgttgcataggtttgatcatacttcatattgccagtaacagtgatttcatcagggttcgcaccaagctgtgcaatatattctgcatcaaaatttgattgcatacagaatcgttcgatagagctcaacatttcccgcgtgaaagcactaatatagcgatagcgtttcatactgcgatcggaaatacgaccattcaccatcataactggaatcttttcagactctgcgatacgcaagaaatttggccaaatttctgtttctactaataaaatagcaatcggtttaatgatatgcaaaattttacgtgttaagtacggtaaatctaaggggaagaaaattatgccttcagcttccggtataattcgatgtgccatcgcatgacctgtggccgtaacgacagatacaacgactaccgcttctggaaactctcgtttaatttcttttacaagaggactcgttgcaacaatctccccaactgatgcagcatgaatccatatcgcacgacgtccttctattttttttaatagtgtagcaggcatatatcctgcactttgttttatacgctcataaaaaccatcttcaaaagcaagacgatataggataaccggaattaggccaatccagtaaaatatgagcaatacattatatatccagtacatgtttatcctttattagagaactgaacggaataaagatggttatataaaccattttccaaggctaatagttcttggtgagttcccttctctaccaacttaccttgatttaatacaacgatttgatgtgcattttgtacagtgctcaaacgatgggcaataacaaaggctgtacgaccttccatcaagcggtctaacgcttcttgtaccagtttttcactttctgtatcaagagcagacgtagcttcatcaagaattaaaatcttaggattcttcaagatagcacgtgcaattgcaacgcgttgacgttgaccacctgataacgaactacctcgttcacctacaatagtatcgagaccatcaggcatcttatccacaaactctaatacattcgccgccttagctgcttcgtaaatttcttcatcactcgcatctaagcgaccatataaaatattctctttaatggatgcattaaataaaactgtttcttgtggtactaacccaatttgattacgtaacgatttaaaggttacgtctttaatatctgtaccatcaattgttatagatccactcgtaacatcataaaaacgaggtaatagattggctaatgttgtcttgcctgctccagacggtcctactaaggctacgctttcaccagccttaacagacaagttaaaatcacataatgccattttttcaccatcgtaggagaaactaacgtgattaaaatctacatcgcctttaatatccggtaattctatagcgttttctttttccactacatcggcttttgtatctaaaatatcaaacacacggtcagctgcagccaacgctttttgtatattaccatacacttggctcaagcgcttaacaggatttgataggttaatagcataaatcaagaacgcaattaaagaaccagctgtaatcgttcctgtaactacggaatagccaccataccataagataactgccactgcaatcgctgcagagaactcaaccataggacttaataagctagtcaatttagtggctttaataacggcattgaagttattttgattttctacttcaaagcgtttaacttcaaaaccttcgcgggcaaaagattttacgacgcgaatagcggaaatcacctcttgcaaaagagctgtaatatcagcgatacgaccttgtacatcatggccagctaaacgcaactttttaccaaatacatttatgataatcagcaccattggcaccgtaataaatgtaaccagtgttaacttccaatcgatgagtaacatggaaactaaggaaccaattaaggtaacggactctgtaatgagagatattagattatctactactgctgattgaagagcagatacgtcatttgtgagattactcatgatgacgccagttttacggcgatcaaaataggataaggacaagcgttgtaaatgcttaaaaattgcttcccgtacatcgatgataacccgttgaccgatataggacatattgtaagtttgcccatatgtggcaaagccacgaattaaaaatatcaaaatgatggccccaacgatgagattgagcataaacatatttttatcttgtaatacttggtctacaacgtttttgattagccatggtactacgagatatgctgcagctgctacaatcatgcaaaatacagcaaatatcattcgtttataatagggtctcacaaaatacaataaacgtgagtaactattcattagttttctccttacctaggtcataaatcaattgagccacgcgattaacagcacctgactcacctagtttttctttgacgctgcgcaattcggagcgcatatgttgattaacttgcaaatcatctaatagaggcaagacggtattcactatagcatctacggagacatcgtcttgtagcaattctggaatgacttccttgccggctacaatattaggcaaccctacatgcgtaagatttacgaccatcttaccgatgccatatgtaataggcgataccttatataataatacagttggcaactccatcatcgctgtttctagtgtagcagtgcccgatgcagctaaacatacatcacagatttgcatcaaatcataggtgtggtcttccgtaatcgttacaggaacatttcgttcactgatgaaagcttctaattcactgcgttcaatcgtatgagcacgcggtaaaaagaactgtacatcttcgtgagactgtaacaaacgttccccactttcaagcattacatccaagagggataacacctcttgttttcggctgcccggcatcaatagaacgcgctttgcttctggcctagccccaaagtagtccatcgcctcctccttagtcatggatggatgcacgatatctactaatgggtgccccacaaattctacatcacaattgaacttgcgatatgcttctgcttcaaacggaaaaatagaggccacctttgtaacaaatttcttaatcgtcttgccacggctgctatgccaagcccaaatagtaggcgctatatagtacaatacaggaattcctaactggtgagctacttcagctaatttcatgttgaatcccggataatcgatacatacgagtacgtccggtttttctttcatcatgacccgttttaaataggtgcgtaatttaaagaactttggcaatgattttatgatttctacgatgccaataacgccgagatttttgatatcatatacgatacgaacgccagcttgttccatcaaggtgccacccataccgaacatttctatattggaatctatttgtgaaagcgctttggccacgctagcgccatgtgtatctccagacgcttcgccagcagaaaacataattttcatcatagttcctttctagcatctacaaatgcttgatctacagcacaaataataatattatggcgattagccatttctagtacatcttcttgttgtacaaatatcgttttttcagcctctacagccaaaacattacaaccactatcaatcatggacattaatgtcttaatacctacagcaggcacatcaaagcgaacatcttgatttggtttttcagtcttaacgactacggcctcacctctaccgagttcaccgccgcgcaatatgcatttatcagttccttcaatagcctcaatagccattgctgctttatgctttactactacagtttgaccaatatcaagcttgcccatctgtttagccaattcaaagccgaaacaaatatcctgccattgttcttctgtcggttgtcgtttggtcaacaccccaaccttaggcatgaacggtttcaaatacacagtttgatctagaacagaaaaaccttctcgttcaatttcatcaacaatagcgagcataatagtatcatctttacgatttttcaatcgtttaagaacacccaaagtttttaaatcagggaaggataagcctttatataaaatttcctttgttacctttccgagcatagtaagctcagtaacgccctcttttttcaaggttttaaatattttgcctaacttagccacactaatgttgtaaaaagaatccgcttctttctctaatatgggatccgtatcaggcacaactccgatgactacaacttgatgccccaacatatgagcagcccgcatgaactcaacaggtaaaacgccaatacctgcaattaaacctacctttgccacgactatacctcctatgtgaagccttatatggtccacaatttttcgtcaaatcatttgttttgagtataattttaagacatactcatatacactatattgtactataaatcacgccattttactataatttcaacgcttttctagctataaacgcactgtattttcctacactcttactcaaaaaggatgcgtctaaaaagagtataaaataaccacaaaaaaactctacattatataaacataatgtagagtttcatattaatcacgacgtgtacgcataataccacgatcagcattgcgtaaaaagcgtaataagttttcaatttcaacagaagaatcaagttgcatttccatctcttcaatcgctctagacaagctaaagcctgaacgataaatgatgcggaacgcttgcttcaagctacggcgtacctcttccgaaatacctgcacgagataggccaacagagttcaatccgataacacgagccggttgaccatcagcaataacataaggcggaatatcttgtaccaccttagccataccgccaaccatagcattacggccaattttcacaaattgatgaacaccagcgaggccacctataaccacgcgatcttcaacgatagcatgaccagccaagcctgcacagttactcataataacattattccccacaatgcaattatgagctacatgcgtacacgcttgtaataaacagttattgccaacacgtgtttcttcgccttctccagtagcgcggctaatggtaacgaattcacggataaccgtttcatcacctacgtaacaataacttttctcgcctttaaattttaaatcttgcggttccaaaccaatggatgcacctggatagatttcacaacgtttaccaatggttgtccaaccaccaataactacattggcaccaatctgagtgccatcccctatttctacattttccccgatgacagcaccaggtccaatgacaacatctttgcccagtttagcattcggatgcactatggccgtgttatgaatgttggattccgcattttccatgcctacaactatcactacaatcactccttaagtctattatacaagggcaaacatgtattcaccgctagcacaaagtttatcgcccacataagcgcgaccttcaaccttgcccatacggcccttaatttttacaatgtctacttccatgcgtacaacatcaccaggttttaccggatgacggaaacgtactttatcaatgcctgtaaacataggtgttaatccacgattttcttcaggatataataaagcaatgccaccaacttgggcaattgcttctgttaatagtacaccaggcataactggatttccagggaaatggccttggaagaacaattcattgaatgtagcatttttaatgcccacagcacgcttcattggttccaattcaataatacgatctaccaatagcattgggtaacgatgtggtaaaatttctaaaatgtcttcatggttaagaatcattgctgtgtctcccttatttcttctattatactatgagccaaacgagaattgagttcatggctcgattttaacgcaattacatgtccctcaataggtcccaataaatataaatcacccatcacatcaagggctttgtgacgaactaattcgtcttcaaatcgtggaacagataaacaggttgtatcatcgtatacaagagcattatctgtactgccaccctttgccaagcccatggcttgcaattgttccaattcttttacaaatccaatggttctagctcgggcaatatgttcttcaaaatactcaggtgttacatcaaaatcacattgttgcgtaccaagcaacggatgtggattaatcgatgtaaatgtaacgcgatatccatcataaggtacgataagaataaatctatcgccatcataaatggaatgactacgtttcaccttatacacatgtcgttcagcttgttgttcttcaattcccgcctgaaggattaaatcaacaaatacggcactactgccatcgccaacaggtggctcaggagagtccatttcaacaaagcagttatcaatattcatagcactgaatgcagccattacgtgttcaacagtgaaaacctttgcttcaccatgttccaaagtagtagcgcgcatagtgttcgtcacattatcaatgtgtgctcgaacggaggggtttccctctatatctgagcgcacaaacacaattcctgtattttcaggtgctggcttaaaaaccatggttacaggttccccgctatgaaggccaattcccttatatgaaatagcctgtttaattgtttgttggggcttactcataagaatgtcctttcataatctaattccatgtctactatacaccatactgtattataccctatttgcatagctgttacaagaatataggactatttatcaactgactagatgtaaaaaatcggcattgcaaagctttattttaagacatctgcaacgccgattatactttttatatttttttaatgaaacacatctggtggagtatcaatcttgtcaccatagtaacgacgagtccatttccaacgattatgtagccagaaccaatcttctggataacgacgaatataatcctcaataaattcattgagcttaatcgtagtaattgctacatcccgtttcttatcatctgttttttctacatataatggtggatgtacttcaatttcatgttttcccgtataagggctatagtgcatggtcacaaagatgataggtacatcttgcatacgccctaatacagcaggaccatctgctgttagtgtttcataaccaaagaatggtaccaatacaccattttctccaggatcctgatccataatcaaccctaaaaaagcaccgctttttaaagctttcaccatatcgcgcacactcgtcttatacatcacatgttgatgcataagctcacgatattcattgataaatttatcggcatcgccgttttgttttaacgctacagaaattagagggtacccttcagaagccagtacacctccaagcaattcccagttaccgctatgaagggcagccagaatagcccccttgccatcagctaagacttcatccaaaatatccttattggtaaagttgaccatatctttatagccgccatctttaatttcagggtatctcaatacatcgataatcatacgaccaaatcgagtcgtactcgccttagcaattcgttttgcttcaacaggatcatcagtgattttacaaaacaaaatctgcccgattgccaaccgcttccgtttaggaggcacagcaagccaagcaatttcaccaagcaatgtacctattgcatactgccaactatgaggcaacatgcaaataaaggcactaaacaacttcataaacctatacataaacgtattagctctccttaagctgcgcttttaaagcatcgatttccttctgcaattgttttacagtttttaccatttctggtaagcgatgttcataagcggacagttttaaccattccttatgaggacgcattgggtaaccagccataacagcatctgctggtacattaccagtaataccagttttaccagcaaattttgcattgtcacctattgtaatatgccctgtacaaccggtttgtcctgcaaaaattacattatttccacatttcgtactacctgcaattcccacttgtgcaatgaggaaacagttttcaccaatttcaacattatgtcccaagtgaactaggttgtcaatttttgtcccttttcgaactaatgtagatcccatagttgcattatcgatggttgtacaagatccaatttctacatcatcctctaaaatgacattacctacttgaggaatatgcgtatgtacgccattttcagtagcaaaaccaaagccttcaccaccgattaccgctttggcacgtaatacgacacgatttcctaatatacaattttcatgaacaacggcgccagtatatatatcacaatcattaccaacacgagtattatgaccaatataaacatatggacgaattgtaacattatcaccaatcactgcattatcattgataacacaataggcaccaatagcaacattatcgcctagcttaacattctcaccaatgattgcagtaggatggatttcacgtggtattacaacaggtggatgaaataattgtaatacttgtgcgaaggcaacctttgcattatctacaatgatttgtgtcatcggtgcattgggcgcttcttgctctaaaattacagcaccagctttacataagccaatgtgttccacatattcaccaatagcaaatgtaatcgattgaggtgccgcttgttcaaagccacgtgtctctgtgattactagcgattcattaccaaccaccttaccaccaataagttgagcaagctccagtacggtcttttccactattaagtcccccccaagtgttaactaaactattgcgcagcttcagcaggttgcgcttgttgggcttcaccttgttgcgcttgttgagcttcttgttggttcgcttcattttctgcagctttaatatcttcatcagatgctttgcccattttattgattaagtcatcagttacatctacgccgccaccaacaacagcacctttaagcaatactacatctagctttttctctttagctaattcattaacttgttgatcgatatattgtttcaactcttgattttttgcagttgtgaaagcattaaaatcttgttttgcatcagtcgtaacttgcgctttagatgcttcgtcagcagcatcgattttggcttgaagttctttaccttttgcattaatttctttgttaatctcaatagatttcgcagtttgtgtcacaactttttgggaatctacataaccaatagtattgctaccacagccaccaataattggcagtgccataatcattgttgcacctaaaattaaagatttcattttcttattcatcgtatactccttactgaactcgatatgacgctttcacagcatctgttatatctagccctttgatatttccaccatgatcaatcaaaacaaggtctaaatgacgttcttgagcaataatagcaacgcgcatccgcacgtcctctaaaatggcttcatgaagtgcatttacctctgcctctttatccgataatttctttgcccaactatcgttccactcttgaggaactggcaaattattcgtcgatacaattgctttagcttgattttgcatcattgtatcgcgtttcttcgctagttcagcttgtacagattcggcatattgtttaagttcttgttcccctgcatcacggataggttttaattctgcatctactttagcccgtatagaatccatatcaaaattggatggtttacgtttagccagcaagctttgaagtcggttttccaattcagctttttgtgcctgagccgcttctttctgcgcatcatcgatataaacacggctatcaaaagcatatagttgtaattgtagatttacaatctccaagtcatatcccttgttagcaactttgagctctttcatgtatttttgtaccagttcagcccgtttagcatctagctgtgcattaagttgattttgttttgtagcgattcgcgtttgtaattcaatatttaacgcatccgacaatgtcgggtctagagacaaggatttaagttgttcattctgcagatcagacttggtattcaacgcctcctgttctatggcatattgagctttaagctgttccaactctgcttttgcattcttataatcttcataagacggattaaactctagtacatcatcaatttgtactaccccaatagatggcccttctgaagattgccgattagtaataaatccataggctccatacatcgcaatcagtgcagctgctaaaaacagaaataatcctatataccgtttatttagcttcatactgctcacccttatctgattacctttgtatcattattattttgcatcagatgctagtttttttagtacttgatcagtaatatctacaccaccataaagaactgcatctttaggaagaactacagataaacccttcgcattaccaacagctttagctgcttccattgtttggtcagccatctgtttattcatttcttccattttcttttctacattagcttgtgcttcttgcttaattttagctttagtagcatcatcttgagcagcatctacctttgcttgcatatctgctgctacttgactacgataatcagtaaattccttagcagcttttacatatacagggttttcaggattatccaaacggctcatatcaattacacctacattactagcagcactagtaccaggtgtagccatttgagtataggctaacgcaccaataccgataataaaaattgcggcaataacaatggagaatattttcacattcttcttgttattcatcattctcatcataatgaacattcctcatttctgttaatctacgcactatgagtgccataatagagatattggtgaaagccccctctatagaaggtgctttcaccataatatgtctcaatattagaattgtgtaccgaagctgaagtggaatttcttcttatccttgccaataccatagtcgagtttaacaggaccgattggtgtagtgattcgaacaccggcaccaacgccatagttaaagctcttagtatttttataccaaggaacattaggagcatcccaagcatcaccgatatctgtaaataatacgccacttacctttttcacgatagggaaacggaattccaatgtcgcattatacatatttttaccgcggaattgatcatcttcgtaaccacgtaatgtatctgcgccacctaatgtgaacaattggctatatggtgcatcaccttggatgaaaccaccgcgtgcacggaaggccaatacatttttggaacctacttttttgtatgcacgcatttcagctgtgaatttatagaaatcaaaatcaccgcctaaaccatgaccagcccattgtgcagtgtaggaaatacgacgaccacgagttggttcataaatgttatcacgggagtcatataccttttgccatgaaatggaattgatgcgaccaaagtttttacctacataatccatgccggcaaaatcatatgttttattatcccaaccattaccagatgttcctgcaggagattgaccagcacctttgtcatagcggaatccggaactatcatcagaatcccatttgtatttatcggatcgagattcaagtgttaagtagtcgcgtgtatattcgcctgtttgacgaccaaaggagatattaaagcctttggattttttgttgtattctgctacttcgctaccatcgctatcatagtcagtgtattcatcttcacggttgaagaaggagaatccaagagaagtacctctgtggtcaatccaaggtttcaagtaagaaatttggtagtttttatatttcttcttaccaccgatttcccagtgaactttaaatttatcacctgtaccgcgaaggttatcttcaccaaattcaacgatacccatcaagccatcggatttagaataacctgcacctaatgtgattgtacctgttttatgttccaatacgtcaatttcaataattacattgttaggatctttttcacctggtaacatacgtacatttacatcatcaaagaagcccaagttgtacacgcgttctacggaacgacgaactaagaacttgttgaatggtttaccagttttttgtacgaactcacgagtgataactttgttacgagttttcttattaccagctggtacaatatcttctacaatgccttccacgatatggatatgaatcataccattgtcatctacagcaataccgtctacatgagctaacatataaccatcacgagcatacgcggcattgataccttgtaccttttggcctacatatacggagttcatgatttggccttcaggaattgccatatatttagttaatacatcggatgtgtatacagaattaccttcaaacacaacaccatgtactacagggttagtcacaacagcaaagtcaattttcacgccttccggaacagatgtaaagacagggttcacttctgagaaatagccactgttacccaaattttggacatctttaaatacaccatcaacggaaacagcatcgcctaccttttcagataacaatgtcattaattgcgccgcttgatcagcaggaataccagagatagataagcctgtaattgttttacctacaaatgggttaacagaatcagcactaacagcagtaacgtattgagcctcaacagatgttacggcttgtgcctgaccgttttctgcaaccttatccaagtctgtacctgctgtagttttggaaaccatttttacttgtttatcgtctgtttttaaagccccgttattaacggtaactgtgccatcagaaccttgtacaacagtaccatcagtggataatgtagtgtcaccacgagcagctaaaattgccgcatcagtattatcttgtgtattagcacccttttctgtaccagcattgtatacagctgctttagtcgttgtatcatcagtagttgcagtatctgctgtagcagttgcattcatatctggtgtatagcctgtttgtacttctgcagcaaacacactgccagtacccataacagcagtcaacacagatgctgctagcatacgtttataggctttgcttgttaacataaaatcctcctaaaattatccctctttaaagagtattaaatctttattattatatcatataatactgggaattagtactactataattcaattttatgaaattaaaatgactataatgaaggtccttattcagattcttcattatagtcatcattgctagaactctcgtgtccaacgtccaccaatataggtactaccttgtgatgtatgccaagcattaaacttaacatttcgccgtaacgagtattcaataccatatttattttgtttattattgataccttgcgtataggtgatcatcgttctcggcaagacatatttgccgatttcgatattataatttcccgatgtttccctactagtaggttcattcggatctatggagcctgtcgtaatattaacacgatctaaacccaatgcattttgcactgcatcttgtacataaccaaaagcaaacatttgtgcaccagctacagctaatgcattggcatcttcattggtaattgtactactattcgatggttcaccacgaccaaaggtcaacatagaaatgatttgcttacgcgataagcttggttcggatttaagcgttaaatccatatggtccacagtacctttcacgccgagataaatattataagtacctacatttgtttccgcatctagttgaagcataggcaaatacgttccagatgtaaaagttgcagtcccctttgtaatatcaaaggtatggcttagatatttaaacgtaccactcaccacgttaaactgtccactagaggtaggattaaatacagagcccccaaaatgaacatctccactaatacgcatattatacaaggttctatcgtagagtcgtacatttttaccagcatgtacgttaacatcaatccccaaatcacgcgtgctttcactagtttctaaggaaagtggaattttgaacttcatattctctagatttagattccccataagtgtagggattccctctttttcagctatatagagttctccctttaatggacctgaaatatactcgttagctaaatctaacccatccaattgaatggctgcacggtaactagtcatggtatgacctgtccaattaaccttcgctgctaaaccagcggtccctttgcccgcagatatgcgagattgaaaatctgcttgttgacctgagaaaattaaatccccatcaatattcttaagctcattccctacagtctttatcttcatggtaccatttcgaacagatactgtaccgtacgcttctggttgatcaatagttcctgttacatgaacaacaccttttaatgccccagttgcgtctttcaccgtaggagtaatcaaagggataacagccatatcagcctcattaaagtcaatagtcatatccatcgctttagaatcattcgcatctagatatccagtcgtatacaacgcggctagaggaatcttgccatatgcacttagcttatagtcttctttaaccccttgaatacgttgaacgttaataacatgattttccatggttgccaatacaaaaccttgatcaatatcgataccgttataagaaccattggcaaggctcgcggacaattcaaccttaggattttgtgtagcccctgtcatattgataacaccggtaatggaaccagttgcattaatattatcaccaataagcggtaagaatggttctatatcaacatcgcgaactgcaatttgtaaatctgcatcaccatctaaatcaacagtaccaccagcagcaataagtccatcatcaacaggtaattttaatgttcgaattttaaacttacgattttctagactggcatctatctttgcatcgcctactaccttagtatcaatagttacatccttaattgaacccaccacattaaggcttggattgccataggtaccacctaaatcaactgtaccactcaaagaaccatctaatttatccaccggttttcccagtaaggataatagattgcttacacgaccatttgtcacctgtaatgtaccaaataatcgcttatcgcccacagtagacatacctgcacgggccatataatggccaccttgttcttcatcaaattcaaatttttctaaattaacaacggttttatctgcatataatgtaccagaaatattggtgatcccttcgccattaatggttaagaagttagatgtaacagatccattaaaattaggattgtataaagagcctccaatatgccccttagcttgtacatagccttttacatcataatcagtattgactaataacctaccaatatctatatctttaccttctaaatcgatatttagggcatcttctgacatagtaccagaaccttgaataacagcaccatatccttgaatagtaaacttaggtaatgtaagagtcttattttctaatgtataatctgcctttgcatcactaatcaatttgccattataggaaccgtcatataaatgaacatgaccttgaacatatggattatctaaagtgccctggatttcgttttcagattcaaaccaaccagtaagtggaacatcagaaaacggcctaattaaattctctatccgaacagcttttgcacgcgctcgcatattaagtgcattagaattcaaatcaagtgtaccccctatagtaatggcaccatctccatcacctatagatgtatcggttaattctaatatatgattttgaatagtaaaacctgcattaatggaattaaaatgagctccaccatacacaatctcaggactcgtaacactaccagtcacagatggattatctaagtttcctgtaacagaggcatagcctgtaatattgccagatatgctagtaccaacaagacttgaaaaattagatgcatctaatgaatctgccgacagtgacaaatctagttgattgttattaatcgtcccatatccactaagttggccatctcctattgcccctgtaagcgctatattcgttaagttacctgcgttattaaagctaacttgagcagaatcaatggatataccacgcacggataggctcgttcccactatattaccttctaaggaggtaatatcactatttttgcctcttacagaaaattcaccattcacagtgccagacactggtgtagataaattttgtgtaaacggagctatttctgcattatgaatagtgccatcaatggaaaattcaccgctatcaataccgtattggcctttggcttttacgctaccattaccaatgtacaatgaagcatcatgaatatccacggtaccattagaataactaaaattagcctcaccactatcgatatgatagttatcatacgagatggcatcactctttatagaaccagatacatagggattaacactcgtgccaccgatatgaacacgagcacctacgttaccagtaatttgatttttggtaaaagcctctaaagctacggaatcagcaacagcatttaagtttaaaccaacctcgtcccctaatgttactaaaccattcaccttaacagcttgatcgtttacataccagccactatgactgattaaaatggtattattttggaagaaaatcttaccattgccatgtccaatttggtatgtagtagacccgtttttataggtaccaccaacgccatcaaaggctaaattaccagacatagaatacttgccatcacgccccgtaatctgcgcttttacatcatgtaatataccagatgttatagagaaatttttattggatggaaccatattcataatgcctgatatatcaacagactcggctcgaacaaacaaatcaaaatcatccactttattcatgtcgatagagccattaacagcgatcgaatggtcatctaaaagtccatttaatgccccttttgtcataccatcaacatttaaggctatatttccatctagattggatagcctatgtacattaccatctttaaatcgaacagcacctgtagcatcattaatgacgatattgccatcaaatgatttcttatcattttttgaagatgactccaataaagaatttacattccaagatccatcagctagttgccacacatggacgtccggttgttccaaagtaatggtagaaacgatggctgcaccacttgaattccccatcaaaatagatggagcagatgtccatttcattgataccttcatagtcggaacggccgctaccaaatggtcattttcatcccttaatgatacattttgcagtactacatccccattccaagcgatgtgcatagaatcatactgaattgtacctctaactgtattatgtagttgttcctgtaccatgggcgccacatatcgctctgcaattggattgatggaagtagctattccagctacacccaatcctaaaactgctgcaccaattaggcaccattttttccttgtcataggaaaccccacacctaaaaaaattacgcttatttatacatcaatattaccatactctatgatatttcaatagtatatgatgtataaattttatgaaatcaaaatgtaatacagttcattcaacgataaaaaaatgacgaccgccgaagcaatcgtcattgtaaatagagtgtatattatctctatgattatttttttgcaggtgtagctgtcgctaatgctgctaattgttctacagcaccactattagcaataatacttgccccttgacctacaggagtatccaaagggatacctgttgcttgttcaagagcagaaatacttacattgtaattatataaagcatctacataattattgcgagattcagtcaatttagtttctgcatcgagtacatcaaggtttgtacctacgccagcgcggtaacgaagtgttgcaatacggaagttttcttgaccttgatgtactgccgtttgcgtactttgaattgtttgttctgcagaacgcaagttaaggtatgcttgttgcacagcaagatttaccttatcaacagctgctaaattagcttccttagccttttctaatgtatcttgagcaaccttaattttattttgtgtttggcccccatcccacaaactccatgtagcggatgcgccaatatgccaagatttactgcttgtaccaaagtagccatctggatcagcatagccacggccagcttcgacacctactgttggtaaataaccagctttctcagcttttaaaccctcttcagcttgttttacagccatcgcagattgtacaagagcagaacgatgaagcatagcatacgcttttgcttgttctaatgtaacagcatatggtttgtattgcaaatcatgttctgctgttgtaatagacgtttgtgttggatatgcaatcaccaaattcaagtttgcttccgctaaattcgctgcattttgcgcttttacaaggtttgtttgagagtcagccaaattagtatccgcagccaatacatcagaattagctacaagacctacattatattgagcctttacattatccacatgaccttggtaatccttaacagcttggtttgctacgtctaccttgttacgatacataatcaatgtgtagtatccattgatagcatcatatttagcttgttgtaaagcttcttcataagcagcaccactaccttctcgagcaaagcgagacttatcaatattagcatctaactcagggttaaatacaggggccttaatagtgaagctatgttgaccagtcttactagtaacagttctccccgtcatagtattggcaccgcgattacgagcgccttgccatgtataggatacattaggattttttcctgctgctgtagcacttactgtggcttttgcagcttgataatcccacaaggattgtttcgccgtgcggttattagccagtgcaagagaaactgtgctatcttcatttaggttcaatgcgacttcatattgttgtgcatcttgagaagctttttgagctaattgttgttgagttaattgaatagcttctttttgaagttttgtgagtttgtcaccattattgatagatgtagaaacaacgtcacttgcgaatgcacctgttgtagccatcgataatattatggctaaagaaaaggccttcttattcatacgtatacctccacacgatatgtgttttaaaagacttgtttaataccaaagtaggtgcctccatttgaagaaccaaatgggcgtgtcatttgcacaacaccatacgtattattatgtaagcgtatatcagaacgtagtcgatatttaggatgattcaaatcatacatagctgcagaaacaccaaaagacccacgtggattatagtcaatgccaaatccgagtttgctttcaaaaataccaccgcgtactaaccatttatttgcgataaatttaccgccattcaaatcaaaatcggtatcatcaccaatattagaaagtccaaattcacccatgcctttatctgtgtaaacgcgagcacgaccattgatacggacctcttcttgatttgtattataaagtaaatccacagaaggttctactttaatagatgactttttttcaggaccattagcctccgaagaaccattaacggtttcagatgcatatggtttgccgcctaacaatttattgacacgagcagaaatttgctccgtattatgcaatgttgctttaatattttcttgtgcttttggatccgttacggttccttccatggaacgcgccatgtgatcaacacgatccgtggtttgtttaatattcgtcaagatagcacgcatgtcattaccagcattaccatcggcattaaattgttgagccgcttgatttagctgagccgtcacatctgccatattttgtgtaaccgctaccgcattgtcagccatgacagccgtagattgcaacgaatgttttaatgcgtcttgtgttttagggtcgccaataatattattaatggattgcaacatttgttctgtaccagccattaatttttgagcactttgcatggctttatccattgcatcgaccccttcacctttaacggaatcaccatcatgtaaatatacggttgatttaccaggtgaaatttgaataaatttatcccctaagaatccatcagatcctaaggaaaatgttgaatcgcttggtatttgagttttatcatcgactttcatcttcaccaaaacaccagatggtgtaatttcaatatcagaaaccgtaccaattgcgacaccagaaaatttaacctgattaccatttttcaacccattaacttgagcaaaatcaccggtaatcgtcatctgaggttttgcaaatacgtctatacgccccacaaatatgatgcccagcacgaacaacacaacacctacaattgtgaaagcccctactttagcttccgtcgtccacttcattatctgtctctccttgttccgatatcgatagcctccgcctcaccatgaataaattgttgtactttaggattaggtgagtttttaaaatcctctgttttagatacttctataaatttccccttatcaagtaatgcaattctgtcagccacataaaaagcagattgcatatcatgagttactacgatagatgtacaacccaatcgctcttgcatacctcggatgagcatactaatggtccctgatgtgatagggtctagacctgacgaaggttcatcgtacaagatgagcgttggatcaagcgcaatagcccgagcaagactcacccgttttttcatacccccagataactcattaggcatgtaagactcatatccgcttagcccaacccaaccgagtcgctcatcaacaatatgttgaattttatcatcacttagattggtatgttcccttagtccaaaggcgacattctcccccactgacatagagtcaaataatgcggagtattgaaataccatgcccatcttttgacgtaccttattaaattcttcttcagataatgtagtaatatctacaccatcaacaataatttggcctgatgtggggcgttgtaaacctataatcaagcgtaatagcgtacttttaccactaccactaccacccaaaataacaagcgtctccccatctttaatggtcagattaacagaatctaatattacacgcgtgtcataggctacaaccacatcacgtaattcaatcataaagccctcgttcgagataatcgattaaaagagtagagtcgataaaaaataatttaatacaaatactaagataatacttgttactacagaactagtagtggagaaaccaacagcttcagcccccatcttggtatgcattcccttatagcaccctacaagagcgatgacagcaccaaaaacactagatttaattaaccctaatgtaaaatcagaaatggttgaaaatatttgtatcgaatctaaataggtggctggtgctaaccccttaatagtagtagctacaaaataaccacctgcaataccaatgacaacgccataaaatgcgaggattggtaccataatcatgcaggctacaacgcgaggtacaacgagataaccgattggatttacagccataacgcgtaatgcatcgatttgctctgtaaccttcatcgtaccaatttcggccgtaatggcagcccctacacggcctgctaatacaacacctacaagaataggtcctaattcacggcccatcgcaacggccatgagtccgcctaccgtaccttgtgcaccataggtaattaacacatctgttatttgtaatgtcattacaccacctgcaaataatagtgtcagactaataatcggtagtgagtctacgccaagatgagccatctgttgcagcacgtgccatgcattgagcatttttaattgttttatggtctgccatacaagtagcatggcagtacccacattcgataagccggccattacattgcgacctatcgtctcaagccaattcacaacagtcccccttactatttgcttatatttcgaattttactctacttgatcatttgaaggtttatcattagatggtttctcattcgaaggtgcatcacctgctggtttatccttggatggtttttccttagatggtttattaacagacttgtcttttttattttgagatactttggaatcttttttattaccttgatcttctaattccaatttatgttccatcttaacctgttctttagcttctttagcacgtttagctaatgctttgtcacggtctttaatactcataacttggattgtaaattgaccgtccccttgaacaatatactctgtgtcgatagcagttttttcatttttcttttcatcatctttgccatcgctaaggtcttcactaccttttttctttttaagatctccagggctaggtttatcttctacaccttgaagttttgcctttttcacagagcttgtagaagcctcttcatttacaagactaacgccatcttctaagatttctacaacaatttgattattcgtatcagtcttttgtaattcatcaaacaaatcgttaaagtctttgtaaacttttaaacggcgtagaacttcatcagtcaaattatatttttgtttttccaatacataaggcaatgggatttcgccaccaccacgaacctctaaggtgtatttacctaaaggttggtctttaggtactgtgaagaatacctctttattgactttttccccacgatatggttccaatgtaacgtcaactacgattgtatcccctggagatacaactgtcgatgatgcagctgcatctacaagttttgccgttttcttatcttgtgttacctctgtttccacattgatatccgcaatttcatagttaataaagcgattgttcatcaatacatcgataacattgtaaaattcatcaaccgttttttcactaatagattcagaactgtagaacatattggttcgcgttaatgatttttgttcaccattacggggtgtaatggtataggtaattttagcagtaccagcaccactgcggtctagtgtcttattcaacatattatacagtgctgtagccgccaatgtaggtgtcatatccttatcttcaataacctttacattagactgcttatcacggcccatatcgatatcttttaaatgaaagcgaactggaatcccactagaaatagtaccagagacaccggcaatacctgcgccacggtcctcagtaacggtaccgatttcacgtcccatagaacctagtttaaaggcggattcataacttttaacaaccgtaaaaatattggcattatgcataaaataattagcggaaccatgtttcaagaacggatgcccgaaggccaccatttgtttgccatcaacataggtaacggtaccaatagcaccgagttttaaatcgccatcaaccaataacgctgctacagaaccaccagcctctaacggcttagcaatatcatcactactagaactagctgtatcataggtttcgtaattgtattgtggtaattttgatttaaaatactccatagatgtactatcaaatccataggccatcaaaggagttttcattggaattaattgtttgtctgaccaagtatttgtcaaattcttttcatacggtatattccataatttcaccatatcttcgataggcgttatcatgccaatcgtgccatcagcaaagccccaaccatatgctacggcacctacaagtttcccattaatatatacaggactaccactcataccatgcgcaatgccaccggtctgttccataacagggccagaaaactttgcaagaattaaatgtccagatgggcctttatccttcataacgcccaataccttaacattaaaattcgatatcgtatcccctactattactgtttttgctataccttccataccagtctgtacatcttgaacaggcataaaatcaactgcctgtgccgatgatagagcactacagaagaaaagcgccagtatcgtttttctataccgacgccaagaatgagaaaacttcattcctatctcctttatttgctttctacagtgacaacgacttgatcacgagaaatatctgaacctactgtaacatcaactgcagtcacagtgccattcaccgtggatttagctgccgccatagggcctgccaatgtttctacagtcaccaatgtttgaccttctgtaacagaagtgccaacagcaacagtagaagcaactttacctgttaatacactttggtatgatacaggggccgccattacagaagtaatacctaatgctgttaaagcagctaaggctaaaagtgtctttttcataacgatccctccttttacaatagaatacataaatatattatactaaatctctagctttttttcaaacaaaattgtatgcaactcattacttgattataagtattttttcataagtactaggcgtttcattacctttgtgagtataatggccatcaacctctacatcaacactgccttgattagataattcaaatccattgatagcccctaaagatgtcaatagattagccccttcttctagtgtaacacctacagatgaagcattatgtttatctacagtggctacaacgagcttttcatcctttgttgtgccgatgaaacttcgactacgattcgtagaatctttagggcccacataactaccattatgtaaaaccagtgtgcccccttcaaccatagcgccaccagcagtttctaccttcgcaagttcctgacgtggttgtaatacaacaggcgtgcccacttttaaagattttaatgaagctatggcctcaccatgagcagacaatacaaattgattgttccctaatgcggaattgccatttcccaccttaagaaccttcccattacttactgtcacttcataaccgaattcatttgtatttgtactttcaccaaaactagatgtatatagcgtaagagcattatttctacgtggaccatttacagtggtaatcaccaacgtagatttaggtgtcttagcctgcaacaatggtttcttctcttctatgaaataccctctacttggcgtatagcgaagaacgccaacggattgaatgcgatttaaatctacctcaccagatgcactaaccgaatacggtttatcgaagctctttcccggaacggataaaccgacagcagcaatgtgttgctgtgaaatcgaggacaaaggctttccaccgggcacacttgctaccaccattggtgcatcattgttaactgtcatcgcataagcgcgaattaatccctcgttaactgctgtttttatgttagcagtctgaatcgatgcacctacacttttcgttgtcttctgactgtaatctgaaaataaatcaacaaccacacgattgggatttgatagggtgaaagcatggtaattaatcgattgattggcagatagtctcacttgtaaaccatcattagtaggttgaaaggacatacctttcaacacaccgatcttatgtgttgtacgttctgcggcattggaaattttattagttgtattggctaagttcaaggtaaccgtattttggtttgcgttatatgacttagtccaggataaaggtaattcagtcatatcaaaaacaatacggcttgcaccatcataatcggatactcgcacggctgtcaaatcaccggcacaagcagtaacagtagttgttaccataatagatgctattatagcggctgttttaaggcgtatcatcatcgaactcctttacaatatatagagtttataaattctgtatgttaacgtattctgttataaatcagaactagatataacaactcaaattagattatactttattattaattttatacaatctattcacttgtagtatacactatttctcgcaataatacaaaaagctgagacggtttcccacctcagcttttctaattctattgtaagtcttctaatgtatctcgcaatgatgacatttcatctaatgtttttgctacccctttaattaccgcataccttggtaattcgactaaataagcagctatgccaacagatcgagaaataacacggtcaagtccactaatcaacgccccaccaccggtgagaataataccatgatcgcctatagcagccaccaattcaggtggcgttttttccaatatagacttgattgcctcaagaatactcataacttgagactctaatgcacgctgtatttctagcgaatgtaatgtaactatcttaggcaaaccgctaataacatcacgcccccgaatttctacctctcgctcttcagaacgccggtctacagtgcctgcagatatctttatttcttccgccgttagaggaccaatgacaagctttttcttgcgccgtacatattgaataatagcctcattaaaagaatctccgccaatacgcaacgattcactcactacgacacctgtatcacaaaggacggcaatatccgtagtgccaccgcctatatctacgaccatagcaccaaccttatccgcttcatttaaatttgtgcccatagccgccgctaaaggttcttcaataagaaccgtcttcttagcaccagttcgtaataatgcttcgagaatagcacgtttttcaacaggcgtaattcccgacggaacgcaaacaacgatacgcgttttcataagacgcgatgcaggaacaacagaacgaataaaatactttagcataaattccgtcatgtcataatcagcaataacgcctgcctgcacaggtcgtataacttcaattcccgtcggagttcgcccaatcatgcgacgtgcactttcacctacagctaatacatcgccagtccgagtatctttcgccacacaagcaggttcatctagaacaaggcctttacccttaacatagattaaaacattggctgtacctaaatcgatacccaaatcaaatgtaagggaacgaccaaatttaaacaccgtttctcctacattctgaggggatacaatacgcttcaatgtcatagctggagtggtctttgcaatcggtttcgtccgtttttgacgacgctctttacggcgtaattccgttaccttaaccatagcagctcgtgaagtgcgctctacaaccgactcttgtttagcttttgcatcattatcttgactgcgacgcaaagccggcacttgtttacgccggcttcgtttctttgtattctgttttggccttttgttcttattcgtcaacccgaacaatatcggcacctaaccttttcaatttacccactaaatcatcataaccgcggtcgatatgatgtaaacgacctatttctgttgtaccttccgcagctaagcctgcacaaactaaagccgccccagcacgtaaatcagttgcattcacaacagcgccatgtaaggattgcatcccttctacgatagcttgtcgattatcaatatctatatgagcccccatcttacgcaattcagcaacatgcataaaacgattttcaaatacagtttctgttactgtacttgtgccttccgcaatagtagtgaatgccatgaattgagcttgcatatctgtagggaatccaggatatggtaatgttttaatatctacagcttttaagcctttgcctgtgctaataacacgaataccgtcaatatcttcttctacggtaacgcctgcttctttcaatttagccactactggtttcaaatgttcaggtaatgcattttctacgaatacatcaccgccagccatagccgcagcaattaaatatgtaccagcttcaatacgatctggaataacggtatggatagcaccatgcagggattctacgccttcaatacgaatcacattcgtacccgcaccgcgaatgttagcccccatcgcattcaagaatgtagctaaatcaacgatttccggttcttctgcagcattttcaataactgttttacccttagccatagaagcagccatgattacattttcagtggcccctacacttgggaaatccaagtaaatttgagtgccttgtaagccctctggagcatgtgcatatacataatcttctgtgatttcaatttttgcacccaatgcttcaaacgcttttaaatgtaaatcgatagggcgcgcaccaatagcacaaccaccaggcatagaaatcttagcttcccctttgcgagccaataatggtcccatcacaaggaaggatgctctcattttgcgtaccaattcataaggagcttcggtagccgtcaacatggatgcatcgaagataatttcatcatcagcttcgtttcgtgtaatcttaacgcccaaagactcaataacttgggagatggtaccaacatcctctaaatttggaatttccaataatttactcggtgttgatgctaataaagtagctgcaataataggcaacaccgcatttttcgcactactaacgcgcacgcgaccattcagctgattaccgcctttaataacgagcttttccaaaagaattcctcctacatttcttatatcaaaatggttatgttcatgtataaccatattcgccacactgttatatactaacgattattatactattttttaggctttctcatcaagtaaaacccctaagattatcaatctaatcttaggggtctacacagactatttactgaaagcaaagaaattaacgagctttcaatgttgttaatttttcatctctatgaatcgtatctaggaatcgtacagtgcctgttttagagcgcattacaatagtatgcgtacgagcaccgcctgggaagtattgaataggattcaataagttaccgcgtgtaatcgctgtagcagcaaagattacatcgtcagtacgcactaaatcatcaagtgtcaatacgtggttaacatctttgacacccatttcatgacaacgacgaatttcttcttcatttcctggtttcaaacgagcttgcatatcgccacctgcacatttaagtgctgctgcggctaatacgccttctggtgcaccaccagtaccgacaaccatatgtacgccagaaccttcgatacagcattccattgcagggttaacatcaccatcagaaataagcataatacgagctcctaaatcacgagcttccttcattaaaccataatgacgttcacgatctagcattaccaagttgatttcatcaaccttacggcccatctttgcagctacgttttgaatattttctgtcaaagattttgtaatatcaatagcgccagcaccacgaggacctacacaaatcttttccatgtacatgtctggtgcatgtaacaagccacccttttcagcaatcgccataacagcaatagcaccgttttggcctttggcaatcaaattcgttccttcaattggatctactgcaatatctacttctggaccgccagcaccaacatgttcaccaatatataacattggagcttcgtcgatttcaccttcaccgataacaacggtaccggaaatacggacagaatcaaatgcttgacgcattgcatcaacggctaagccatcggcttcgtctttttgaccacgacctaacaaacgaccactacgaagagcagctgcttcgactacacgagcaaattctaaagataaagtacgatccattttagggcctccttaaaaagatgtttatattacttattgattagcttgtttccaatcagccatgaatttttctaaacctgcatcagttaacgggtgtttcatagcttgtaacaacactttatatggcactgttgcaatatgggcaccagctttcgcacattgtaaaatatgcaatggtgtacgtacgctagcagcgataatttcagtattaatactgtgaatagcgaaaatatcagcaatatcttgaatcaacgtcaatccatccatgctaatatcgtcaatacgacctacaaaaggactcacaaaagtagcaccagcacgagccgccaacaatgcttgattagcagagaaaatcaatgttacatttgttttaatgccctcttttgaaagcactgcaaccgcttttaaaccttctggagtcattggaattttaacgactacattagatccgagttttactagttcatgagcttcagcaatcatacccggcgcatcactagcaataacctctgcactaacagggccatccacaagatcagcaatttccttaattacttgttttaaatcgcgcttagctttcacaattaacgatgggtttgtcgttaccccatcgataaagccataagagtaagcatctttaatttcactaaactcggctgtatcaataaagaatttcatgggtcctccttatttagcaggcgtaattttttcaacgccgcccatatatggaaccaacaccttaggaatcacaacggagccatctggttgttgattattttccaaaattgccgctactgtacggcctactgcaaggccagaaccattcaatgtatgaacgaattcaggcttgcctttagggccacgacggaacttaatatttgcacgacgagcttggaaatccgtcatattggaacaagaagaaatttctctatatttattttgtgcaggcatccatacctctacgtcataagttttagcagaaccaaaaccgatatcaccagtacacaatgtgataacgcggaatggcaattctaatagacgtagtacttcctctgcattgtctgtcaatttttctaattcattccaagattcttctggttttgaaagtttcaccatttctaccttgttaaattgatgttgacgaatcaagccacgtgtatcacggccagctgaacctgcttcagcacggaaacaggcagtaaatgcggtgtaatatttaggcaattcatcttcactcaagatttcaccgctgtgataatttgtcaatgtaacctcagcagtaggaatcaaaaagtattctgtattctcaacgtggtacatatcttcagcaaatttaggcaattgacctgtacctgtcaacgtttcacgagttaccatatatggtgtcatcatttctgtatagccttgcttatcaacatgaagatcaaccatgaagttaataagagcacgttctaaacgagcacctaagcctttatatacggtaaagcgagcaccggacatttttacagcacggttaaaatcaagaatatctaattcttcgccgatatcccaatgcgcttttggttcaaaattaaattgacgtggttcgccccatttgcgttgttctacattttcatcttcatcagcaccaacaggaacagatgcatcacacatatttggcaacatcaacgcagcattgcgcaaagattcttctacttcgcgaatgcgaccatctaattcagaaatttcatcaccaacgcgtttcatttctgcaattttatcatctgcattttctttattgcgttttaattggctgatttcttctgttacagaattacgtaatgcctttaattcttcaaccttttgaatcaattgttttcgttcatcatacgcagcaacaaaggtatcaagatcaccctttgtatgacgattatccaaattttgttttactaattcgagattttctcggacaaatttcaaatctaacatagtatcagcctcttctattatgtcgtacaatttagtattttaatacatttaagtataccataaaatatagcattattcatcatcttcttcatcgagaagataatccttagccatccatttacgtgtggcagtgaaggaaatagtgacccatttctctgtgggattaccgccgatttcttcatctatttcatttcgaatacgatcaagttctgctattgtttgataaggaaacttctttggcactagaatatcaatctctatgatgcgcgagttaccataagcctgtacactcgtcacataatccttaaatgaatatttttccataaaacgatccatgatttcttgtacttcatcatgtaaagacgaaggcgcccaacctaatatttgtttcgtagaaggcacaagaatcttaacaaccgatggaatcatttgcaatgctaatacaatcaaaacaatagggtcaatgtagacagccaaataattatatgatgtaccctctaacaaaatggccgccacaaaactgatgagaatagcggcctctagccatgcatcaacagaccaactaacattatcaaacttgatgagattcgattgtaggcttttattaatacgatgaacataaaaataataagccgtatcagctatagtaaagaaaatagcatagtaaatggcaatgccaaaatcaacatggcgaccaccattcaatagatcccctataccactaatcaatgcgtataatacgattaatagaataaagaacccttcaacaacgagtacaagaggctcaaattgccagtacccaaactggaaccgtttacttgtttcacgcgctaccaatttagcggtcataagcatcataatcttaatgattacatcaataaatgaaaatataccatctaataatacggcactagaaccagtaattacacccataatagtaccgctcacggccaccaacgacattaatgcaacggattgcgttaataatcgttgttctatggaacgccttgcagctaatatatccataattacccccttttatacctatattattttattatatcctatattgagtattttttaaaatcactcagaaaaagccctctgctattagaagtatagaattctaatagcagagggctattcaaaggagatagtatcgccaaagttcttattacaatgacttaattgtactatttaccaatattatgttctaaatcaaagcgatcagatacgaaaccgtataatgtccaacctgcaaaggttacaatagaaccgtatgtcatagcttcaaaaccagatgcatacaatgcatataagctatacaaggaaccgataaaggcgataaatgtcgtaactttaagttcactaccagtacgttttgcggctttcatcaatacgataacggcagccatagataagaggtaaggaataatattcgttacaacggccaagttaaccaatgtttcgaattgttcacttaaggaaggactaattgtcattaaactcataaaggattgcaagatagtaattgttatcataccaactactggagcatctttagatgtaattttactgaacaatttagggaagtaaccttcgtcagcagcgcctttaaatacatttgcaatcgtaaactgccaaccaagtaaggaaccgaagcaggacataaccataagtcccataacaatcttgccaaccgtaccattgaacatagacgcgaatgctaaaccgaatggtgcattactattaacgagttcactagctggtacgataccaaacatcatgttagtagaaataatataaatcgcagcagcgcctaatgtgccaccaagaacggcttttggtacattcttttctggattatctacagcatcagcattagcacatgcggattctaggccaaggaaagcccacaatgtcatggcgatggagtttgtagcagcttcgccaaatggcatgttgttgacattccagtttgccacatacatatctgcggagaaatatgcccaacctacagtactaattacaagtactggtgcaataacgccccatacagtaaagctagatacacgacctgtaatactagcaccaccaaagttcaatactgttgcaagccataacgtgaaaattgtataaataccagtcattaatggtgttaatgttgcatcagcaaaggttgctgcataccctacagcggaaatagcaattgcaatattagcaatcaaaagagatacaccataggtatagtttgccataaagttccctgctttaccgaaggaatattcagcataaccacccatgccgccacctttgcgtccatacataccacatttagcaaatgcgtatgccaaacacatggagcctacggctgtgatcaaccaagatacgattgaaagagcacctacctgtgccaactttgttggcaacatgataataccggagcccatcatatttacagctgttaaaattgtcagctgcaatacggacattttatttttgcctgtactcatagttttaccacctttttattgattgtggcgccgtcagagaagctctgacggcacacaataatgttatttttcaaattcttttttcaatacatagccataagcttttttagttccatctggttgtggtgtaatgtatacgccttggatttcaggagcaaagccaggtaacttattgatgccttcttgcaatgctaagaagtaatcacaagctgttttggaccagcgttcgccaggttgtacacacaatactccaggaggatatggaagagcgccttcaagagcaatgcgaccttcagcttcatccaatggtacgagctcacctttaccacgttggaattcaaagttcgcttcttgaggattcattacatattctggaaggtagtcatgtaagaataagcgttcttgcaatgtactaacttgtctatccttgtagaaatcatgcatttcttggcataattgacggatatgatagcctttatatttgtcgatattagcatagtaaatcgatggtaaaacatcttgcataggtgcatcagcttcaattaattcttcaaagcgaatcaattgtgccactaaatcgtccatcttagttttggattctgctggtgtcatcaagaataaaatagtattcaagtcacatttttcaggaatgataccattttcacgtaagtagtttgcaagaatattggcatgaataccgaagtcttcgtattcaccagtttctacgttgataccaggtgtaatcaattggaacttgcaaggatcgataaagtattgacctttaccataacctttgaaggagtgccatttagcatttggttcaaatgcgaagtagtccacatcttgagccatttctttagtatccccatcttcccatttcttaccatgtacaacaggaggtactaatggacgaagatatttacaatgtttcaatacagatttacgagcatcaataactgtttctacacagtcaatccatagttttttaccagcttcgccttcatgcatcttagcatttacgtcaagtgctgcaaataatggatagaatggagatgtagacgcatgcatcataaatgcattgttaagacgtttatggtttacataacgatcttgacctttaacgtgtttatcttttttgtggatttgagatgtttgagagaaaccagcttgttgtttatgaacggattgagttaccaatacacctgggtcattagggcctaattccaagagcaatggactgcagtctttcatcatagggataaattgttcgtaaccaacccatgcggagtcgaagaagatgtaatcacaaaggtgaccgattttatcaacaacttgacgcgcattatagatagtaccatcgtatgtacctaattggataactgctaagcggataggacgttctgcttttgctttttcaggatctttttcagcaatcaattcacgaatgtatttttcgtcgaaacagtgttccaaaataccgccgatagaaccaaatggattacgcgctgtttcaagatatacaggagttgcaccagccattacaagagcaccatggcaaatggatttatggttgttacgatcatatagaatgatatcgccaggtgttaatagggcattcaatacaaccttattagatgaagatgtaccatttaatacgaaatatgttttatctgcattatatacttgcgccgcatgttgttgagccgcacatgctggaccttcatggattaaaaggtcgcctaacgcaacgtccgcattacaaaggtcagagcggaatacgttttcaccgtagaaatcataaaatgcacgaccagctggatgtttacaatagaattgaccaccttggtgacctggacagtcaaattgagagttaccttcttctacataatcagccaacgctctaaagaatggaggcaacatagattcttcatatttgtcagcagcagcttcgatttgacgtttatataagtcgaagtttgtactagaaccatcaattacacgttccactttccccatgaattgatcaatatcaacagaattatcaaaaacaactaagaatacagggatgccaaaagattttacagtttcattatctaagatagctgtatcactttcactaataacgattgctcctatatcagtaaaatcggtttgacttaaatctacactttcatggccgtctaaaggtccaaagtaatattgtgccttatgagaaaatgcaaccttcatgtgtttcataatacgttcctcctaaagtaagagttgtaatttaaattaatggaacttatgtacataaatataagatgtatacccctttagtaattgatagctatctcatttagttaggtgtattctttatctttatgtatattctaacatttatacaatttaatttatagcgtttaataatacgaattacacatgcacacatagcaattatgagttttacgcaagatgaatattatattaaattatagaatatagttgtataaactttttcatatgttgataaccattattaatatgtaaagtaatatataccaaccacttcatgcatatctacttactggcacacaaaaaaaaggctgtaatagaacacagtttcaccgcattctattacagcctttaatttaaaaattattcagttatttcttcttgaacttgagatgtttcaggtttcattaatgggaacaacaatacatcgcgaatggatgcagagtctgtcaagaacataacaagacggtcgataccaacgcccaaacctgctgttggtggtaaaccgtattcaagagcattaacgaagtcttcatccatacggtgagcttcatcatcaccagcttcacgttctttcaattgatccaagaaacgttgtttttggtcaattgggtcatttaactcggagaagccatttgccaattcacggccatagataaacgcttcaaaacgttctgtagccaatggattttcacgacttgctttggcaagtggagaaatttcttttggatgaccatacacgatagttggttgaatcaaattttcttctacataatcttcgaagcaagcattcaagattttaccaataccatcattattcgtgtattctacattcaaacgatctgcaatagcacgcgcttcttctacagtagttactgcatcaaagtcttcgccagtgtatttttttacaccttctgccattgtgatgcggttccaaggtggagttaagttgatttcagtaccttgatatgtaatttcttgtgtaccgagtacttcttgagcacagtaggatacaagattttctgttaagcgaattgcatcttctacatcgccatatgcttggtaagattcgatagttgtgaattctggattatggcgattatcgataccttcattacggaaacaacggttcatttcgaatacgcgttccataccgccaacgattaagcgttttagatataattcaggagcaatacgcatgtagatatcgatatcaagcgcattgtgatgagtaatgaatggacgagcagctgcgccgcctggaattggatgcatcataggtgtttccacttccataaaaccatcgttcatcatgtattcgcgaatcttcgcaacgattttagaacgtttaataaatgtatcgcgtacttctgggtttacgattaaatctacataacgttgacggtagcgaagttcagtatccttcaaaccatgccatttttcaggtaatggacgcaatgctttggacaacaatgtcaatttgtcgactttaatcgtaacctcaccactgtgagttctaaatacatggccttcgatacctacaatatcaccaatatcaagcatttttacatatttgtaattatcttcgcccaatacatccttacggaaatatacttggatatcaccagataaatcgcgaatattagcaaatgcagttttaccatgggaacgcatcgtcatcaagcgacctgcgatgactacaggttggtcttcgtagttcaagaagtcatttttaatatcttttgcatgatctttaacaacaaatcgttggccaaatggatagataccatcagcttcgtattcagccaatttgtcgcggcgaatttgcatttgatcatttaattcttcttgtaaatttttaatttcttcactcatgttatcgcctcttttgttaaaatgaaaaattattgaattgctaacactttgaaagtaacaggaccatctggtgtggatacctctacttcatcgcccttacgtttacccaaaatagctttacctacaggtgattcattggaaatacgattgttgaaaggatctgcttcggaagaaccaacaataacatattccaattcatcattgtacattgtatctaatacggtaaccttgctacctacggatactacatcacccttaatggattcatcaatgatttttgctgtattaattttattttctaactcagaaatataaccttcaatgaaagcctgttcatttttagcatcatcatattcagagttttcgctgatatcgccgtattcaatagctgttttaatacgttgtgacacctcaatacggcgcacagatttataatatgctaattcatcctcaagttttttcaaaccttcggctgtaagtaatgtttcttttacgtctgccatagattctcctaatctttctacatataaataatagaaaaagtgtcatagtacgatgacaccttatctttcatctttaatttttaatcaattatactaagaacccctgtatttgtcaatgtgagccccatttttccaatacatctctataggttgaaagctctgttttaaagctttcaacagtgtgaattgtattcacacgattacgccaataagctgcttcaggcattcccctcatataccatcccgcatgtgttcggatttctcttactcctagagccgcccctttatactgacagagtagttcaaaatgtttgagcaacatatctagtcgctctaaataggtaggttccggtcttaattcaccggtccttaaatagtgattagtgcgctcaaaaatccatggattgccttgtgcaccacgaccaatcataaccgcatcacaacctgtttctcgcatcatacgaagcgcatcttcaggggtccatacatcaccattccctattacggggattgataaggaatctttaaccgcttttatataggaccaatccgctcgccccatatacatctgttcccgtgtgcgcccatgaacagcaacagctgcaacaccagtactttcgatacgtttggcaaagtcgaccacattgatatgatcatcgtcccaaccgatacgcatttttaccgtcaccggtacatcaacagcttttactgcggcttctgctacgcgagccgccaagtcaggtgttttcatcaacgccgaaccgtcaccgctagagacgacctttttaacaggacaccccatgttgatatctacaatatctgcaccagcatctgctaccaccttcgcgcccaatgctattgcttctggattagaaccaaaaatttgcatcgatacaggatgctcgaccgcttccatacgcaataactcatgcgtgcgctcatttttatatttgatccccatagcactgaccatttcggtacaaaccatggaagcaccatgttctttggccaacagtcgatatgctatatcgctaacccctgccataggagctaaaatagccttaccttggataggtacattgccaatggtccatgtttctatcattataattcacctaataaaacaggtacagcctaagccgtacctgttgttatacattcatactataattacaaccaactctattatagtaccattatttatttcgttcgtaaataagacggagaccttccaatgtaagcattggctctacatggtcgatacaatcggtagcactgctgatgagctgtgccaagccacctgttgccaccacagttacatcgccacccatttcagctttcatacgtgtcactaggccctctacctgtcctacatagccatagaacataccggattgcatagatgataccgtattacgattaataacctgacctgggtcctttacctcaatacgaggcaattttgcagcgcgttggaacagagcctctgctgaaatcgttacgcctggcgtaataacgccaccaatataatcaccatttccaaggactgcacaataagttgtagcggtgccaaaatcaatgataatcaatggccccttatatacagcattggccgctacggcattgacgatgcggtcagcacctacctcacgaggattatcatatttaatagcgatacctgtttttgtgccaggacctacaatgataggatttacattaaagtaacgcaagcatacacgttctaatgttggcatcaatggcggtactacagaggaaataatgatagccttgatatcctttgcgttaaccttgcgatcatgaaaaaacaaattcatcatcaacatgccatattcgtccgtggtacgcacacgatctgtagaaattctccagtgtcctactaaatttttcttatcgtaaacaccgagaacaatattcgtgtttcccacatcaattactaataacatgcattcctcctattttcgcggacgtatagaaacatcgcctgcaacaattcgtttaacttccccattagtcgttttcaccaataaatttccatcgtcatcgatatcagttgccacaccttcataggtattccccggtgctctaacctcaatttcttgattcaaagtaacgctcaacttacgccattcatttagggtatcctcaaatccactatctagcacatcgtaatattggtgttctaattcttctaagatgattttgaaagcttctgtccgttcaatatcaacgccttccattaagagagatgtggcgatttgttttatttcttccggtagctcttcttgtttcgtcttaacattgacccctatgcccataacgatataggaaatttcctccatcgatccagacatttcagtcaatataccaacaagcttacgaccatttaccaaaatatcattcggccatttaatacctgcatcagcaagccccattttgtgaaatgccttagtaagcgccacagcagccatcaacgtacatttaggagcctccgcaggggggaaatcaggtcggagaataaggctaaaccacaagccttttccaaagggagaataccaaccacgagacaagcggccacgaccagcagcctgttcctctgtaacgactacggtaccttcctcagcgccttgttgcgccaatctacgagcttctaaattcgttgattcagttgtatccatatatacatatcgtttaccaaaaatatcggtattcaatatttgtttcattgctaatgggcttaacaaatccggttcctccaacaaacgataaccacgctttgtataggactcaattttatagcccttttgtcttagtgcttttatatgcttccaaatggcagttcgtgatacatgacatgcttcagacatatcttgacctgaaacaaagtcaccttgattctgtcttaagaattctagtacttcatcacgcatgataaggcccctttctcctgtcggtttacaattcgattgtacaagtgggcccttgaaaaagcaagtgttatttatcaatttaataaataatcattcaaaaaaatgcaaaaaatctagatttttataccccattaggtagacaaatagattaatgaatgatattacagaccattaatagtataatgagttaaggatgatgaaattaaggagtatgaatgaaacgatttacattagaagaaaaaaatgaggtcctggagaccccctttatccatattcatcgaaaattggatgtattattaaatattgctaaattactaatggaatgcggtgctgacacggtacgaatagtatcggaaatccaacaggctgctacatttatggggattccacacaattatttaaatattcacattagttatacaacgattatgattaatatttttcatgaagagcgctctataacagttttccgaaaaacgccaatccacataccgaatatggccatgattaatgccatatcaaaactcacctggcgagcttttgaacgccatcattctttaactacctatgaacgtttagttgagaaactacaacaaacgattcccgtctatccagtctgggtaaaaggtattgcttgcgcattaggatctgccggtttagcttacttatacagtgcggatattattgcattagtagtaacattcatctgttcattatgtggctattttatgagggtcgtatctcagcgccttggatttaatgaatatttaggcaacgctatctgcgcctttacggccatgtttattgcctatggtttctataccttcatcgagttaggatcactggtatatgtcctcgtctgttgtacactcttcatgattccaggtgtgccacttatcaattcggttatcgatactataaataatcacattttatccggcataacacgagctattagaaccttacttatcgtgggcagcatgacactcggcatggcgatggctctttacttcagtccattgccggcatttaattttgtggatattaagcctcatattttttctatagcacagattattggttcctttgtttccgccgcctcatttgctgtactatttaattcaccagctcgtctattaccctatatcgggctaggcggtgtcgtttgcgtagtaattcgtaacttaatgcttttagaatatggatttgccttacccggtgctacattcattggtgcagccgtaatgagcgtcatctttgtcaaactctccacatggctacgaacatctggtccggtactagtcgtaccatcagctatcgcactgatgcccggcattttgctctatcgttttctatttgatatattacacataaactcactaaacgaatcaggtctattgtacatggcacaaaacgggacgactggcattctatctattgtgggtatcgcagtcggtgtggctgtgccaaatgtactagcccaacgataccttcaaaaacgtaagaatcaacgcactcaagaattgatggctacgagacatgcctgtgatggacaatagcaaggaaaacaactatatatacaacaaggggctgttttcttacagccccttttatattgccttacatatacatacctattttaaaatagaacaggcctgttctattttttagaagcaccatacatacctttcctaaattagtacacgcctgttctattttttaagagcccatttattacatactaaaagtggccttcggggccctttttgcttagaaataccaaaagctactagttgatttcatataaccaactaatagctttttaaatttaaggggctgttttgttacagccccttagttatgtattaagattgtacatcagattctgtagagcttgtcttagtttcttcagtagcattaggcatggaaaccatcgcatccatatgacttgctgtaggcgcttctgtttcatcaggagccttagtagtaccatatttatgaagattttcaacagccttagcatcaatagtttcttcttctaataaagcctttgccatattgtgtaagaaatccatgttatctgttaagagttgttctacatcgcgatatgcttcatctacaatatgatgaatttcaacatcgattttacttgcaacttcttcactatagttgcgttcatgaccaatatttttgccgaggaatacttgctcttgttgttcaccaaatacaattggtcccaacgtatcgctcatcccccaacgagtaaccatagaacgtgccgtattcgttacactttgtaaatcaccagatgcgcccgtactgatatcgccaagtacaagagcctctgcaatacgaccaccaagtgctacgcgtatgtccgccaatagttgtgctttagtcttataatcatgttcctctttaggtaacatcattgtataaccaccagcataaccacgtggaataatcgttactttatgaacagggtttgcatgtggcaataaatgagccacgatggcatgaccagattcatgataagcggtcaatttgcgatccttttcgctcacaatgtgactgcggcgttcagggcccatgctaaccttttcactggcttcttccaattcagccatggtgataacctttttgtttaagcgcgcagctaacaatgcagcttcgtttaacaaattgctcaaatcagcaccagtaaagccaggtgtctttttagcaatcgtttttaagtctacatcatctgctaatggtttattacgtgcatgaaccttaaggattgcttcacgaccatgaagatctggacgtccaacaacaacttgtctatcaaagcgacctggacgcaataatgcagggtccaaaatatctggtcgattagtcgctgcaagggtaatgatgccttcattggcaccaaagccatccatttcaacgagtaattggtttagcgtttgttcacgttcatcgtgaccgccaccaagaccagcaccacgttgacgacctaccgcatcaatttcatcgataaaaatgatacaaggcgcatttttcttcgcttgaccaaataaatcacgcacgcgagatgcaccgacaccgacaaacatttctacgaaatcggaaccggaaatggtaaagaatggaacaccggcttcaccggctacagccttagctaataaggtcttacctgtgcctggaggtcctgctaacaagacacctttcggaatggttgcaccaatacttgtaaatttacctgggtccttcaagaattctacaacctctgtcaattcttgctttgcctcttcggcaccagctacatcgctaaatttaacctttacattaccatcgcccatcatcttagcacgacttttgccaaagttcattacgcgaccgccaccaccttgggtttgttgcataatgaagaagaacacaaccacaaggataataataggaatcgcggagcctaataaactaacccaccaagaaggttgttcaggtggtgcagcagtaatctcaacaccattatctgtcaacgttttgatcaacgtatcatcagatggagcataggacacaaaatctgtaccattttttaatttccctttgattccatggtcatttgtaatcgttacagattcaacctttttttgttgtacctgttgaacaaaaccggtataactcatttcggccttattagtattctgccctgcaagggaatctatagcgaaaacggcaattgcaatgataagtaagtaaaggacgagttttttactaaattgactcaaaaaattactcctttcacatgtaatgtataacctaataatgcataatgatatgcattgttatattataccatataaggcgaacaaatactcgccattatttagttataaatatattaacacccttattggtaaacagattctttcaaaataccaatgtatggtaattgacgatattgttcagcataatcaaggccataaccaacaacaaaataatctggaactgtaaagcctacataatcgacatctacatccattttacggcgttctggtttattaagaagggcaacaagtcgaacactcttagcgccacgagccttcaaattatccaataaatagtgaagggttgtgcccgtatctacaatatcttctacaacgagtacatttttaccttctacggaacgatctaaatcttttaaaatacggaccacaccagtacttgttgtaccatcgccgtaactagagcaagaaataaaatcgaatgatacatctactgaatcatcgatggtgcgagctaaatcagtatagaaaacaatagcgcctttcaaaacgccgactaatacaacagattcattagcataatctttgctaatctcagcacctaactcacgaatgcgagttgctaattgttcttgagaatataaaatttcttttacatcttgatgcatatataagacctcccggatctatatctaatgtttgcaatatacaagtattgtatcacattgcgcgttaattgtaactttttgtatggtgaaagttttagcttcccccgtacgtatgatatgggccaattgttcttgatgcgctagggataatgaaacactgggtatcatcaattgccacaatcgtcgctgcatagcgagcggtagtgcccgcatacgacgcctggatacctgaaatccattatctacagattgtactaattgtataaacaagcgctggctttcaccattaagatacgcctcatcaacttgagcaatatcacccaatctacataaggcatctactacattgggattaatggtttgtagcgtaggaattacctcatgacgaatgcggtttctattatatttcacatcttcattagatgcatccacgcaatattcaatatcctgtaaacgagcatattctagtatttcatcttttgtaaccgccaatagaggtctaactataggaacagtgtaatcatgacttatcacagacatgccggtaatacctttgataccagacccgcgcaatatgtgtgctaaaatggtttccccttgatcatccttatgatgagcagtgacaatataatcataatgttcacgctcagctaattcattgaaccacttatagcgctcgtatcgaccaacagtctctaacgactcctttcgctccccggctatagtgggaatatcctttttaacaccccaaaatggcaaattgttcttattacaataggatgcaaccatttgcaattcacttaggctttctctgcgaatagaatgatccatagtagtaacgccaatagtccaccgtgcttttctatgtacctttacatattgcaaaacatttaataagaccatagaatctgggccccctgaacaagcaactaatattcgtgcctcacagggaaataaattgtaatcttttaatgtcttgttaaccattctatggagttgtttgatttgtttaggattcgatttactgtgctgtctcatcataacttgtaatcaattcttgttgtaatgcttccataccatcttgttcacttacaaaaatatgaggcacctcataagcatccataaatgatgttagtatttctgcaccacttacaataatatctgcacgcccaggctgtagtcctggtacatgtaaacgctcatcacggctcatatagcgcagttgtaagataatgccttctatacattctctagaaagcttatgaccttgaattttatggccatcatattctgtcatttttaaatcaatagccgctaaggttgtaatagtacctccgataccaatgaaatcaccgaacgtaccttctatcatcatggggtcccataaaaaccgtgtttcttcccatactcgttgagggccttcatccgaaagaggtctaaggcgtaccgcaccaatcggataggagcgactccaatagatgctatctttagaaccgagcgccaactcagtactaccaccgccaatatcaatggttgcataatgtaatccgtcagctaaacgatcttgtaaagcgcctttaaatccataaactgcttcttcatcaccacttaagatacgatacgtcatggagcaatatgtcatggcttgctccataaacgcaatgccatttgatgcttctcgaacggcactcgttgcaaatgcaagacaatggtctacgccataatctttcgctagagtggctatttcagaaaacgctttataagatgcatccatcgattctgtcgttaacgatccatcttcatttcgtttgcctaatcgcgttgtccataaccgctttggttcgttatgccattgaccatctgtataagttcctagtaataatcgaatagaattagaacctacatcgataatagcagctttcatagtcgcccctccttattatccctctatgaattacccactataattgcaattttaaagtatatgcacaaagagatggccgaaaccatctctttattttaatcgcgacgaccgccacggccaccacgtttaccttctgtattgcgttttaaatcatgtaatcgctcgttgctatcacgcaagaatgatttcatctttgcctcaaaagactctgcactttgtcgactttgtacacggcgctctggacggcgttcctctacttgtggtttttcttgagtttgacgaatggaaagaccaattttactaccatctacagataagacctttaccttcactgcatcttgtacttttagtacatcgttaatatcctctacatagccatgagctacttctgaaatatgaactaaacctgtttgtttatcacctaaatcgataaaagcaccaaactttgtaataccggaaactgtaccgtttaaaacgctaccaacttcgattgccatgcaacctcctaataaaacctcaaaatataaactaaaactacaccaatgatgacaagatcattttacatatggcacttcacccggtttaacgaggcctaattgctcacgtgctacattttcaatattcttaggatcttgtagctttgctttttcttgttctaattcatcatttctttgttgcaattcttgcaattgttgttcaatatgttgtttttcttgatatatagctactaagcgatatgcttgtccaagtaaaagcataaccattactgcaactgcaatgcgtttcacccacataatgacaatcttacgatcttcagcgcgtcgatttcgttgcacccgtctacgctttatcggtttttcacgatgttcagattgtttcatgtagcgcccccaaaaatagtattaactatatacataataacaaattataccacagaacccctaggaaattataggtagaaaattgtataaaagtagatttattttaaaatatatttaaggtacattacatagtttctgctttttttgcatattctctaataaccgcacaggattttttaaataaagccaattcatcctctgtcatttgtaattcaagaacatcttctatgccatccttgccaatgacagcaggtgtggatgcaaaaacgcctgtttccccgtattgcccatctaaataacaagaacatggcaatacttttttctcatcatggaatacagagcgaattaactctgtggtggcacttgctataccaaattccgtagagcctttgcctgccaacacatgatatccaccaattttaacatcatctaaaacttgtttataatctagttctggaaatctatgaggcaattctttttgcaattctactaacggcttgccttgtacatacacatgggaccatggcaccatagcacttgcgccatgctcacccatgcaataagcagtaatagttcgattgctaatatcgaatatatgagctaactctttttgcaatcttgcagaatctagggctgtacctgacgaaataatgcgctttggattccaatctaaatgtttacataaatacgtagccactacatctgctggattagatatagaaataataaagcccttaaatccagatgctttaattcgaggaataacatcctttagtactgcgattgtatcaccaaggctttctaggcgatcttgatataaattaggtagtggacctgcactaaaaacaagaatgtcacaatcaccacattcttcaatcggaccagatgtagcctttacacgatgagggatataactaaccgcatcattcacatccatagcctgtgctttagctttcttttcatcaatatccatcatatataactcatcaacttcgccttgcaaagctaaagaaaaggctacatgcgagcctacatgtccagttccgataatacctactttacgtaatttcataagggcctcctcaataccattggtttataaataattgaaaggactattatagccacttactataatagtcctttttttaatatattgttagtcccttccgaaaaagaaactcactacagcaataacgataacagcacctacaatagaaggaattaacgccatacccgcaagactttgagctaatgtacatcagataattctaaaggaaataaattctcgccttgtacatcaattttatttttctctacatattgtttacgcatattccataaaatagtcaaatcatctggatctattttatttaatgcatagattcgtataaattgagaaccataatagcctttcaagctatctggaatccctttcgttccttctcctagaatacgtgtattaaaatatccctgaatttctcgtttcgaccgatcaatgatgataaatcctgaaccatccaatatatataatttagcatctctttgtttaagagactttacattatttgtaataaaaaacgctgtatctaaatcgatgagagatgattcataacctgattgataataaggctctatataatgagcccccttatccgtagcatttaacatatcagtaaagttatgctgttcttcagctgtaaaatcaccaaaaccacctacattctcaacatggcgcacgcctttttgatagttttttagttgccctggctcaatatggttacctttaaattggattgcattgagacgaatagtattttcttttacattataaataccataaccttcatagcctaaaaagtatacgtcatcaccaatttgtttcattcctaatatacgtttagatataactgcatcatttgatataaccatcaaagtatgctgttcaggatctaccttaacagactttacatcattattaaccatcgacatcgcccaataagataaccccattagaagaatggcaataaagataaatcccagtcgttttgcattcatcttaaccccttatgaatacacatctcatattatttctttagtgtttgaatcctatcacctatggattccccattatatgtaaacgctttatctagctccatcaagggctctaaaacaaatagtctatcccaaaaatagggatgaggaatcactaatcgagcatcattgatatacatacacgcaccatcatccgatagggcatatacaatatccaaatcaagtgttcttggtccccaatgaatacccctcttacgttgagcctcacattctaatgactgtaagacatcgagtaaatcgtgaggttctaatgagctagatacacgccaaacagcgtttaaaaacacatcttgttctgtatagccccatggctctgtttcaataatagttgaactagtaatgctatgcacctctggatgtatagaaagtgcatgatatgcgtcatcaataaactgacggcgatttcctatattagaacctacactaatatagtatgtgtacattaaatttgacctcgagtcgttacaacctctacataatctaatacaccggcaataggtaccgatggtttgcgaacggctacgcttaaaccaataattccttgaaaatgttggtatagtgaatctgcaattaatgccccaatatgttcaagtaaattgcaactttcaccagtcataatagaggccaccatatcataaacctcaacataattgatggagtcctccaaaacatcggtttgaccaggctttgttaaatcagttttaatctccacatctacgaagaagcgttgcccttgaaatttttcagactctaaattaccatgatatccgtaaaaagccatgttttttaatacgattttatccatagtaaaccccttattcgccgcgaagtagaccatccgctacagcaagagcacgtttatgcattaatacattgtgcacacgaaccatatcaacaccttggaaaactcctgtaatacaagctgctacagtaccttcatcacgttcttctggaggaagtccaccaagcatggagccaataaagcgctttcgactaggtgctaacaatacagggtattcataagctgtaatttcacctaaacgttgtaaaacctcaatattttgttcctctgttttcccgaaaccaatacctggatcaagccaaatattttgtggttgtactccttcttttaacgctttatcaacagcagagaagaaataggctttcatatcttcaatgatatcatcgtaatttgtatcattgctgttgtgcataatgataatcggcacgcgatgttttgcagctacggccgccatatctggatcataatgtaatccccatacatcatttaaaatatgcgctcctttagagaatgcataatcagctgttttagcgtgatacgtatcaatggatacaggtacagtagatgcctctaatacaggatcaatcaatacactaaggcgttcaatttcttcatctgctgtcaatggtgtgcatccaggtcgcgttgattcaacacctaaatcaatcacatcagccccgtcaagaatcatttgacgagtccactctgccgctgcttcgggtgtattatgcaatccaccatcagagaaagagtctggcgtaccatttaaaatccccataatcaatgtatggtcaaataagcgtaatgattttccatcactccaagtatattgtctacgtttatacatttgtgcctcctaacatagccaatgcttcgtctcgcaaagatccagcctcccttaataagcctctgctttctatggttaccacttgcgagccttgttgcaaagtccctttcatcaacatacataattgtgttgctttaagacgtacaaaaacaccttgtgccgataaatctcgttcgatagcatcagctatttcccgagtcaatcgttcttgtaattgtggttttctacttaataccgttattacatcattaaacttacttaagccagctacacaaccactatgtggttgatatattacatctacagtgccaaaaaatggcaatagatgatgttcacacatggagtagaacggaatgtctgtaacagctactaagccattataatccgtagaaaacagctctccccataactcctttgtatctttacctacaccagaaaatagctcttcatataattcggctacacggattggtgttttttctaattctggcgcctttgtatcaacggatagagcgcgcaaaaactgttctatcccttctttagcaagttgattcataggccctcctaaacgattttcgttgtccaatcctctatattccaaatatcggtgatccaattttcataaaattctggttcatgactgacgagaacaatggttcctttaaagtcacgcaacgctcgtgctaattcatcttttgcatgtatgtctaaatgatttgtcggttcatcaagaacgagaacattgtattttttctgcattaatttacagagtcttaccttcgcattttcaccaccagataaaacgcgcatttgagatgtaatatgttcatttgacaaaccgcaacgcgccagtgctgcacgaacctccgcatttgtcatagcggggtattcattccaaatatagtctaatgcagtttccgagttagatggtgcatcctcttgagcaaaataaccaacctcaagaaagtcaccttttgttaattcaccactcaccggttttaataaacctaaaatagtctttaataaggttgttttccctaaaccattgacaccgcgaatagcgatttttttgtttcgttcaatttgaaagtctacaggtctagttaacggttcgtcataaccaatctcaaggccaaaggcttcaacaataaaacgactaggtgtacggccttctttaaatccaaaagatggtttgatatactcctttggtttttcaagaatttccattttttctaatcgtttagcacgagaatttgccataccgcgggtagctacacgcgccttattgcgttgaataaaatcctccatacgctcaatttcttgctgttggcgctcataagccttgcgagcctgtgccttctgaacctcataggcggcttggaattgatgataatccccagtatatcgagtaaggacagcctgctcaatatggtagattacattgaccacagagtttaaaaactccatatcatgagaaattaagataaaagcattctcgtaattttgtaaatagttttgcaaccaatgaatatgttctacatccaaatagttcgtcggttcgtctagtagtaatatggtcggtttttcaagtaatagtttagtcagtaaaacctttgtacgttgaccaccacttagctcagatacatctcgttctaaaccaatatccataaggcccaatccttgtgcggttctttcaataaccgcatcaatctcgtagaacccacgttgctctagaatttcttgccattcaccaacttgctctaagagacgattcatttcatcttctgaaacatcacccattttactatacgcatcgttgatattctcttccataatgtataaatcatcaaaagcacgttgcaatacattacgaatggtcatgcccttttcaaggaccgcatgttgatctaaatagcccacggtcacttgattggaccactcaattttaccttcatcaggaggcagttttcctgtaatgatatttaaaaacgtagacttaccttctccattagcacctattaaacctacatgttccccctttaacagtcgaaacgatgcatcatctaatatttgtcgtgccccaaagccatgagtcacatgggatactgttaatacactcattatctatctccatcggaataaaagccgtctaaataagacggcttagttcacactaattaatatatttattgtaccttgattacactagatatgtcaaaatttacacttctaatgattccgcataacgcaaggcaacaacggccataatcttagcacctttaatagcttggtccaatccataaggagaccctgcagcacaagcaaactcaggggtatgtgcttctaactgatttcctatattcaaagtaggctgcgccgtaggcacttcataggatacatttcctacatcggtactgccatcggcctcatcgggtggtaattttcgtgggctttcaccaaactcagtcatcacctcatcaaacaaggatactaaacgttcatcttgcctcatatccttaaataaaggttcatagtgatgcatatccacggtagcaccatagcttgttgcaatgcgattagcctctgctttaataactggtaaaataatatcttctaaatcagataccgtagcgccacgtactgtcattcgtaatgtagccttatcggttaccacattgggtgcagtaccagcctgagtaaatatgacacctatgatagcccctttaggaaagatatcttgtttcatcattttaatagattgatataaatcgacagcacaatctaacgcattaattccagagtcagtcaaagatgcaatatgacatgaccgtccatgaaaggttacctctagaggatgggtagctagcgaggtgccgcccacctcattctctccgcctggatgaatgatgagagccccatcatagtctttaaaaagtccttcattagccataaacaccttgccaccaatggtctcctcggctgggcatccaaaaaaagttgttccccatatatcgcgagcggtttgactaaacgctatagcggcacccatgctcatgatggcgattaagttatgtccacacccatgacctaattcaggcagtgcatcatattcacctaaaaaagccattttatgcaaacgctctaatcctatatcacttcgcatagcggtacgcaattcagggcatttcgttagccctacggtcgtatcaaagccatgttgctccatataacggctaattgtttgtacagcacgcacctcctgttgacctaattcagggttgttatgtaaaaataatgaaatcgatttcaactcatcttgtataccatcaattatggtacacgcttgaatttctcggttctttaaattcatatatccatcctcatgccgccttataatgtacgttgttctgtataaggcgataatacgattgtattagaaatatatcgaaaatgaacatgcccacctaatggcaatgtctgatgcggtgtaccatgtcccgttggtacatagcatacaaagggatcggatagatgtaccgctctattttcttccatatatcgaagagcttcataacctatgtcgtaatcagattcgtcctcatccccttcgcaatcggtaaaggtgccaatcatcatcccctttatccgacttaacaagccggataatctccattgttgtaacatacgatctagtttatatggtgcctcaccaacatcctctataaataaaatcgtatcctctatgctatcatcctctaagaaataaggtgtgccacacagcatggaaagcatagtcatattgccaccgcgcaatatgccgtcccctagttctgtaccaatagcccctcgaggcggctcaggtaaaggctcaataacacgaagtttaccttctaatacctcaaataaatggtgtatatcctcatttcgtgatttagtaaaatctacgcccattggcccatgatacgtaacaagacgactatatcgattgatagccatgtgtaacgctgtacaatcactatagccaataaatggctttccatattcacgtatagcggtgtagtcaagacgatcaacatagcgcatcgtaccatacccaccgcgcaacgctaacaccgcatcacatggcgctgtagtcatcatccactcaaactcttgtgcctgctcctcagggctgcccccatacaagccagtgcgataacaagattcaccaaatataatctgataaccatgttcctcgcatatttgttgtatcgcgtctaaagactcatcactactacttgcaggtgctatacacccaatagtcatacctttttttaaacatcttggatacttccactccataattcctcacatatatagcattgtttacaaggtcatgtactaatagtaactataaacgaccatacataaatcgtaaaatacaaaaaagacgtacaatttgtacgtctttagtgtatcttatttatatgcttttttaaagtctacttgaccaagtacagtccagaaatagttttgaatagttccattagatacatatggttgtgtcgtaaagtacaatggcataactaaggattcatcaaaaatcatgcgttctgctttatgcatcaatgcatcacgttctgcactatctggggtgctacgaatacgagcaataagctcattatattcttcactatgatattggctgtcattatcttcagcagaaaatacttctaagaagttttgtgggtccccatagtcagcaacccaggatgcacgagccacttgatatttgccagcctcgcgattggcaaggaacaccttagtctcttgattctgcaatcgtacatcagcgccaaatgctttatgccatgttgcttgaatggcttctgctatcgctttatgcatttcactcgtattatacaaaatcgtaatcggtggcaatggatgattttcatcatagccagcctcttttatcaattccttagcttgctctacatcttcatatacaagataactaccggcttcacggaaatcatcagttccattgctttcaagcataccatatggaacaaatgcatacgcttcttccttaccaccttttacgatgttctttacaatttccttacgattaataaccatggaaaaggctttacgtacatcaggattggtaaaaggttctgctttcacattaaataggtaataatagttaccaagcatagggcctatgtgcaataaaccagcttcttctaaccgttgttgatctgctacaggaggttctaccatcatgtccgcttcgccaccttcaacgagagtaaggcgtgtactttgagattcactaatcggccaattcatcgtttttgttacaacttcatcagcatcccaatagttttcatttttgacaaaattgagctctccattatgttgccaactcaacaatttataaggcccattagaaacaattgtttccgcattattgccccaattttcattattttctacagtttttttattcaccggataatagccatgagaggccaataattttaagaaatatgctgttggatgttctaaggtaacaactaatgtatcgtcatcaattgcttctacaccaacatcattgcgatcggctttgccattattgaaagcttcgccattcttaatcacatataacatataggcgttatcagcacctgtatccggatccaaggttcttttccaagcatactcaaaatcatgagctgttaatggttctccattagaccacttcagattaggtctcaaatggaatgtatatgttgtaccatcatctgacatagtccaactctttgctatggcagcctctggctcgcctttatcatctaaacgaaccaaaccatcaaacagctgtaattgaacggtcgcctcaggtgatgtactagacttagccggatctagtgttgatggttcttgttccaatacatatcgtatcgtatgctcatcaacaatcttaggcccgttagtatacccaaagacgagtagcaatatactcacgccaaaggctagtaccacgagcttaagcaatttacgtttatccatcatggtaatgcatcctctacaaattctttcataatgagccccatctgagctcctagttgttttgctttatcattacataaatgacttattaataaaacaaaacaaaaatctccattcatcgtttctataatgcccgcatcatgctcaacacaatctaacgaacccgttttatgatggaatattacatcctccccccaatgaaatggcaatatatctctgaactgttgacgccccagaatattccacatctcatggccatatatggtatgacgcaattcatatatatgatgtaacaatacagccatatccatggcagtaatataattttctcggttttcttttaccgctgtaaaatccatcatcatacgattgatttcaaaatgttcaagccctagttgttcagctctggcattaatattttccatgcccaaggcttgtatcaatagattagtcgcccaattatcactgagtaccatcatcaatcgacatagctctaaataactaaaactatgattacccaccaattccatcaaggcgccagccccttcaacacgaggactccgactcaatgcaatcgtatcgttaagatcgagttgttcttgtgctgctagatgaaatacatattccaaaatcagcgtttttaccatactagcaccagtatggacaatcgtttccttagaagaagctactatggtagcctcctccccttcattcagacgcgttaccatataggatacagtggcatctgaaggcaacgtatcaagcaaagctgccaattgcatttctaaggatttccctacgattaactgttccattatttaccccattaaatatgccaacatgcaattcttctatccgcccattcacggagaggtggtcgttcttctaaacatctacgttcaacatctggacaacgatcactaaacaaacaccccttaggcggatgcaacggactcgccggttctcctctcaatggagcgccaattggagcccgcggaaccacttcgccaaccatcttcgtaagggcctttgaatatggatgttgaggaaactcataaatatcaagagccggcccctcttccataacagcccctaaatacatgaccaccatgcgatggctaatgtaacgaaccataggcaaatcatgtgaaataaagagataagaaatgccatgtaaagcttgtaagcgctctaacaacgtcataatctgaacctgtatagacacatctagtgccgaaataggttcatcaagaataatgcatttaggctccataataagggcccgagcaatgccaattcgttgtcgttgcccaccagataattcatgagcatatcgctcaccaaaagacatatctaaacctacctgttctaacacctctttaacacgaatgacacgatctcgaggcgtataattagggtttaactctaatggctcttctaatattgtattaatctttaatctcggattaagagatgcatatggattttggaataccatttgcatcatatccctcgttatatctttatgaatatatggatttacttcaattccattcatataaatagaacctgatgtggcttgatgtacgcccatcaaggtatacccaaacgtagatttaccacatcctgactcaccaacaatacctagtgtttcgccttcctcttggtaaagactaacaccttgtaatgcatgtaccgtttgttttggtctaaacaatccgccagaaagggtaaaatttttaacgagattgtctgtttcccaaatatatcccattaaagtccctccaactttgctaaccaacatgtatactcatgattattcccaacattggatatcataggtatacgttttccacatatgcgcatcgcccatttacaacgcggattaaaggcacatccacgaggtaattcatacaaatctggcggttgtccttcaatggcctttaattcaccatgccattttccctgcggcaaagacattaacagaccaattgtataaggatgacgtggatcattaaacaaatcctctaccgtagcagactcaacacatttaccagcatacataaccataacgcggtcacataattgtgcgataacacgcaaattatgggaaataaatataatgcctataccggcttctacagctaaggtctgcataagacgtaaaatttgtgcctctgtggttgtatccagtgcagtcgttggttcatcacagattaagattttaggacggcccgctacagccatggcaatacatacccgttgacgcataccgccactcaattcatgaggatattggtttaaccgcttttccggagtagataggcccatttttttcaacaaatcgagagctatcgccttttcatcataatcatcaccgtaggcattactccgatgaatcacctcataaatttgctcaccaattgtcaatatcggattcaatgcggtcatcggatcctgaaataccatggctaccgtagtaccacgcaattcattccaatcttcttccacatagtcttgacaatcttcaccatcaatttcaaatttttctgattttattttagtacgaccttccggtaataggcccatcaaagaattaaccatgaccgatttaccgcaaccggattcaccaacaacgcctaaaatttcaccttttctaagcatgatgtcctgattgcgaataatgcgcaaagggcctctaaatgtatcgatggtaatggatagatttcgtacatctactaatatatcattcatcatctatccccttcctttggatcaaatacattacgcaatccatcccctaagaatacaaagccaagcatagtaacactaattgccaatgcagggaatatcaattggaatggatacgatctcatactactaatcccatcagatgccaaaacgccccaacttgccatcggtgcattaacaccaagaccaataaagctcaaaaaagcttctgtaaagatggcatctggaatcgccaatgtcaatgtgataatgataggccctacacagtttggcaaaatgtggcgccatagaatacgccatttaggaatccccattgtttctgcggcaataatatattcctcttcacgaactttcacaatttgactacgtacaatacgtgccatattgagccaatacgcgattcccaatgcaataaagattgaggtaagacctggaccaataacaaccattaacaaaataacgtatagcaataatggaataccgtataatacatcgacgatagccatcataattctatctgttttaccaccaaagtaacctgcaattccgccataaataacgccgattacaagatttaataaggcagctacaataccaatggttaaagaaatacgcgcaccatacataacgcgagtataaatatcacgacctaatgtatccgtaccaaaccaatgtgctaagctagggctttgattagcatctactaaggattgatctgcataagtatatggtgaaatcatagggccaatgattgccaacacaatcataacagctatgatgcctgcaccaactacggccaatcgatttaccttaaatcgttgccaccagttaggacgtactataaaggaggattctcgaatattcgtatcgcgttcaataggtaaaaaatcgtttctatccattacgcacgctccttctctgttgttacccgagggtcgataatcggataaatcatatcaacaataatattcaagactacaatcaaagtactataaaacacagtaacaccaagaataaccgtatagtcacgattataaatagatgttacaaaatattgacctaaaccaggaatggcaaaaattgtttctacaataaagctacctgttaacaaactagcagctaatgggccaatgtaggtaataacaggtaaaatagcattgcctaaagcatgacgaattaagatattccatgcaccaaggcctttggctcgagctgtgcgaatatattcctgttgatacacatcaagcaatccactacgagtcaagcgtgcaataaatgccataggttgtgcggacaatgtaagtaccggtaaaatcatatacgacggaccacgccacattgctactggcaaccaacctagctcaaaacctaccacatatactagaactgcaccaataataaaggtaggaacagaaatacctaatgtggaaacaaatgtaatagcataatctattatgccattaggacgcatggcactaatagcacctgctgcgatacctcctacaacggcaacacaaagagccaataggcccaattgcgcagatacaggaaatgattcacctataatatcattaacagagcgtccttcatatttataggatggccctaaatcccctgtaacaacaccaccaatataatcagcatattgcttccataaaggatcatctaaatgatatttcgcctctatgctagctttaacttgaggtggtaattttttctcacttgtaaaaggtccaccaggtatagcatgcattaaaacgaaggtaatactaataattacccacagtataacaagtgcgctacctatgcgccgtaaaacataccttgccattctattctcctccatacaataaaatttctatattattatactatattatggctctaaatttaaaggtatagatttaatattgtaataaatattttattttttatttatttcttttaaactacatctattaaaaactcatctattcttcatattatatcatgcattacaggggctttctattattccactcgttttacaggttttaacgaatacagtacaatacatatatactatattgaggaggtctctatgactacagtaccaagaatacttactatacaagatatgagttccatcggacgttgctctctaacggttatgctaccaatcatcagcgctcttgggtgccaagcagtaccattagcaacagctgtattgagtaaccatttagagtatccatattttgaaatcgttgatttatctgatcatttaacagcatttatggattgttgggaaaagaatgaaattgattttaatgccatcgtcagtggattcttggcctcaccagagcaaatccatctcgtagaggaagcaattaatcgcttcggtaaggataaaatggtcattgtcgaccctgccatggccgatgatggacgcctctattctatatatacaccagatatggtaaaagctatgcgccatcttatttctagagctcatattgtaaaacccaattacacagaagcttgttttttattagataaaccattctctaccgattccatttcaaatgctgaattgcacgacatgtgtaaaaaactacaccaattgggacctgaactcgttattatgactagcgtaccttccgacacagatgcaacgattgccgtatacgaaggttcaactgatacggtaataacatactctgttcctcttattcctgtgaaagctactggaactggcgatatttttacatctgttttatctggcgccattatgcgtggttttaccgttcatgaagctgctcaactggcgatgaattttactacaaaatcaattcaagctactgtagataacgtaaaatccatgaaacatggtatcgcctttgaacttgtattaccagaattaactaatctatccaaataattcgtttaaattgtccaaatagcctgttcatgatatacttaaacacatagaaaatatacgttatgtttatttttataaaggggacttcatggatttattatatccagttctacgaactgtactaatctgcttagtaggttttggtatagcatatcagggacgacgtaagggctataccatattcaacctttcggggcgctttaacagactacaatttattatacttttcatagctttgatgatactcttctatatcgtagatatcatcgaggaacgtttaatcgactacatcgtaacgttgcctgcatattgggctacacgtatttttgtaggcgcattacaggccatgttatttccactagcctgtggattattcactagacggatacatgatattggatttaatggttgggctggtattttatgggctaccattattattttcatcaatacctattcagccgtaacaccattaaattatttattagatttattcgtctggattatcggattcctattttgggtattacctggtcaaccagagccaaataagtatggctatcctccatttatgaatcaagagccagtacaatcacaaccaattacagaaccaccgacacaagaggaacaagaggttcgaaaaaaggtacgaaaacgacgtaaaaaaagataataaacctagtctaacaacaaaaggctgagccaggaggctcagcctttttgttatgctatgtagttaattcatcaacaacattaattctattaatgtacacccaatataagcaatgataaatttaaccttttgttttctagcacgatcatcatctgctattttcaatcgattagctaagaaccgtttgtctcgaatctgtaataataattgcttaatccgctcttgactttgagaggctacacattcgtcacaatctgtagacaacgaagcttgctgcatgaaaatgcgtcggtgtaacttacgcaattgaatttttatattattatgtacaaatgcactttgccactgttttcgagagtctacatacatatatacataccgtggaatattcattactaagaaggatataataaaaatccctaatgaaattaaaaagtatgtagaaaaagaaaactctaaagtctcagttggtaaatagtgatgaagaattataaatgtaatccatacaccgattggtaacagtaatacagcagcaatatcaatggatctaacccaactcgttctcgttggcacgtcaggaactgtaaatgtatctactggatcatgaaatgcataatagtctaattgcaatacagactgtccagttttaggatttcccaataaaacaggacctgtactacctacatgacgttctggcaatggaataaattttttgattctagaattgggtactaaatcaaattgaagaattcccttcttctcaaatcgcacagtagagcctaatcggccaatagcaataggattaaaaaatatgccaaataggctaaggcaccagttgcctaggaggtggagaatcgagttcaaaataaacccaccggtatctatattagcagtatctaacttaatagcaaaggaagatgaatagtcatcgaaccacacatcttcgatggtaaattccacattaatcacattcccccatttagtaataatggagagaaatacttggttattcggctcaaattcaaaggttacagaatagattaaccaatgatttcgaaacgcagcacggagcatccgattgaccatatcctcttcaatatagagaattctatgatcaaatagttctcgctccacaggtgcagccataagtgtcgtatcctgttcaataataggagaacgttcatttaatgcgtcatccaccaacgatcgtaacttggtgaagatttttgtcatagtcgctccaatttatgcacactacacaagatttttatacctcaaacattacaattataccataatttacccattttatcgaggtatatacagagatctactaaggcctttccatcagctgccacttatacactggccatcgtaagtcgacaatatgcatagaatcgccctttcttagcaattaactcactaaaggttccatcttctacaatacgacctttttccataaagagaatacgattcatcagctctaagccttctaactgatgtgtaatatataaaacagttttttcttttgtgaaagctagaatatcattatgcagttttcgtcttgttacttggtctaacccctccaaaggttcatcgagaagtataagttcaggatttcgcaagaataatcgagctaaagcaacacgttgacgttcaccgccgctaaggcctacccctccactgcctacaattgttcgtaagccttttggcaaccgggtaactacatcagataaaacagcttgttctacagcacgttgtacctcatccgcacttgcatgcggcttggcaaggcgaatattgtcctccagtgtggcatgaaaaatataagtgtcttgtgtgatagatcccattaaatttcgccaagaatcaatcgtaacactctttaattcattgtgacctaccgaaatatagccagagtaatcatatagcctttctaacaaggaaaacaatgtggttttaccagacccactagcaccaacaatagcaacagcctgtccttttggtatatctaatgttaaatcttcatatataagtgatgactgatcatacccaaaattaacatgtttcaatgatatcgtatccatagaatctaaatctacacagcctgtatccttgattggcagaggtgcatgtttaatttgtaacaatcgacgaactgctactaaactttcataaccatgatgaacggatacaatcataggctgcagcgcttcaaaccaagcttgaataccaatggcacatactacgaccataacacttgcccaagggccagttaatacattacttgctaatagggccgctaacacaactacaatctgtacaatagcaataaacatcgtatttcctaaattcatacctttagaaatacgccacttatggtcctctacatcatctatagattgcatcatacgttccataactagattttcattatggtaactaatgatgtcttctaaactttctaatgtatcagtcaatgttgacttgaagtgaccttgtacctgactgatcatatttaaggatgtacgatgataacgatatatgccatacggtagtacaacacctgtcatcagtgcagcacaccacacaagcgttgataaatgcgcatctatagtaccgacaccaaaggataccaatatagttaatacaatggctgctacaggaggaattaaggtgcgtaaataaaagaattgcagtacttcaatatccgccataattcgattgagcatatcccctgcgccccatcgtttaaatatagctggtgccaatggttctagataggtataaaaccatacacgcaacccatacaaaccttgaaatgccattttatgagatgtgtaccgctcaaaataacgacaaacagcacggctaataccaaagaagcgcacacctacgatagcgagactcaagtaagtgataccaggttgtaatgcagccgatgccagtaaccaagaagatacgctcaaaagccccacattcatgaatacggtcagagaagtgaaaactaaggcaagtactaaggaccatcgagcaggttttaatacggaaaataacaatttccaaccttcaatatcactatacttagtttcatcggcttcatatgggactttactattacttaatgcctcttgttgttgtggcaatggatcctcaagcttagaaacatatgacacatcctcatcatccattacaaacgaaccagtcccagcatctactagcgccttaaaataaccattctgtgccaacaaggattcataggttccctgctcaattatttcaccttgacgtaatacatataactgagaggcccactgcatcgtttgaatacggtgccctacaagaataacaattttatccttcatcaagcgctgtaatgcacaactgatttgagcctctgtattcacatccaaatgggatgtaacttcgtctaaaataagaacttgtccaccatgtaaaaaagcacgtgccaaggcaatacgttgtaattcgccaccactaagtcccatgcctccttcaccaacgacaaaatccaagcccttttcacaaattacatcatgtagctccgctagtttggatgcttctaaaagctcgtcatcacttacatcttgtccaaaggcaatattatctcgtagcgtaccatgcataacatgaggtttttgagacacatacgtaacctgtgtacgccaccaatccatagaacaagttgatagatctatatcattaacatatacactgttcgaaggagcctctaaaaaggcacctaatattcgtgcaatcgtcgatttaccagccccactttcaccaacaagcataatcggtttattgcgacatacctgcaatgtaatattctttataccattgcttgtttctggataggtataatttaaattatctaggcgtatggattcaattgtcccttgaatacgacaattgccacctcgaggtaatgcaataggtgtattcataaaagcatcaaatttagcgagtgcagttttaccagacataccggtgtgaaaagcagctcctaattgtctaaaaggtgtataaaactctggagccaacaataatataaagaaggctggaagaaaatccaaaccgccatctaatagtgtaaggcctaaatacaccgcaatgatagctgtacttattgtgctaactaattccaagacgagggcagatagaaaagccacacgcaatacgcgtaaggtagagtctttaaattcattagatagtcgactaatgacttgtatttgttcctttgcacgaccaaacacctttaatgtggtaatgcctcgcaatacatctaaaaaatgacctgataagagactcatccgatcccattgctcttgattcatcttttccgcttgtttaccaatcaaaatcataaacaatggaattaatggtactgtacctattaaaatagccccgataataggcaatgtatccattatggcaatccccattactagtgggatgataatcgcatatatcatttgaggtatatagctcgaaacataggcctctacttgttctaatccatcagtaatgagatgtatcgtatcaccttgagattctcctcgttgaatacctaatctaaatagatgcgcaagagcttctttacgcaaaatagatttaacagaatggcccaaactagacgatacatgttcctgtatataagaaaaaactaaacgtaatataatgaataccgcaagccatgtaattgtattagattcatccaacacagtatgatcaagaaaaaccaaattatgtattaatgtggcaaaaaaccaagcttgtcctactatagaaagactttgtaaaatactagacataatcagtgccaataatacgagccttttacttttaatgacgcgaagcgccgttttctgtatcatatctaaccccctttaaatctaattttatcaatattacattcatcttaccataaaaatgaggcgtgccgctacagcacgcctcacaaaagggctcaaactttcacaatcgttgaaagtacctatattaataatgtaagtctttttctgttacacgatgacggaatgtccagtatacccaaatttgatatgctaatacgattggtacaaataccactgcaaccgcagtcatcaatgccaaggtatattcagaagaagatgcatttgtaatggtcaagctccacgctgggttcaaagaagataccataatacgagggaatagacctgcaaaatatgtagccgtaatcaaaataacggaaagagagctaaatacaaagccccattttgtattgcgcgtacgtgctgcagcccaagaaataaggaagcaaacaacagctaaggcacagaaaatagtagctaagatagagctgtacaaatcagtgcatacataggatgcaataatcaacgcaatcacaccgattgcagtaggtacacctgtaacgagagatgctgcacgtgcacgttcagagataggacctgctgttttaatagatgtaaacaaaccaccatggtatgtaaacactaaaacgaaagcaacaccacataatacagtgtaagggctaagtaaatcccagaatgtaccaacatatgtcatcgtttcatcaataggtgtaccttggatcaagttacctactgttacgccccacaataaggcaggaacgatagaaccgatgaaaatacaatagtcaaatactttacgccatgtgcgatttgcacttttagaacggaattcaaaagcaacgccacgcatgataagtacagcaagcattaagaacaatgccatgtagaaaccactaaacaatgtagcataaacatgagggaaggatgcgaataatgcgccaccagcagtgatcatccatacttcattaccatcccaaataggacctaacgcattaatcatttgacgacgttcaacgtcagttttaccaatgattggtagaagaatacctgtgccatagtcgaagccttctaagaagaagaaacctgcaaacaatacacaaagcaagatgaaccagatcacattaaggttattcataattagttccataatcttgcctcctctttttcttctacatggtaaattgtttgcccatcaggaccttttttaatgtgctctacagctaaatacaatgcagcaatagcagccaagatgtaaataactgtaaaaccaatgatagtagtcatgatttcaggggctgtaacggatttagaagcaccattcgcagtcaattgaaggccatatacaagccatggttgacgacctgcttctgcaacaaaccaaccagtggattgagcgatgtaaggtaatggtaacatccagaaaataattttcaagaatgttttattctctacgagtttacctttagcatttaataccaagccgatgaaagcaactaataacataatggagccagccgctaccatgatgcggaatgtccagaaaattccaggaacatctggaatgtaattaccagggccatattgagcttcagatttagcttgtaaatctttaataccttctaccttaccagatgtaaaggagttttgtgttaagaaggataagccgccagggatttcaatggcacctgtattttgttgtgcttttgtatcgatattagctaccaaagagaatggagctggatcttgagtttcccaaagagcttccatagctgccattttcataggctgttctttagtaatatattggccttgatgatgacctgcaaaagcacctaatgtaccagcaattaaggtaattaccataccccattttacagaggttttatagaaatcaacattgctcttacgaatcaagtgccatgcgctgatagccataatgatgacacctgctgtcatggaaccatttaatacaatatgagcaaattggccaggtacataaccattagatacgatggttgcgaaattttccatttccgcacgaccattgcgaattacatagcctacaggatgttgcataaaagagtttgctacaaggatccagaatgcggataaattggtacctaatgcaactaatgttgccacagtagcatgcgctttattagataagcgaccccaaccaaagatccaaacgcccataaatgtagattccaagaaaaatgccattaatgcttcaagggcaagtggggcaccaaaaatatcacccataaaacgagaatattcagcccagttcataccgaaatggaactcttgaacgatacctgttacaacacccatggcaaagttaattaagaataatttaccccagaattttgccattttttggtaaacttctttaccggtgcttacaaaggtccattctaaaatggctacgataaccgtcatccccaatgtaaacggtacgaatagccaatgatagatagatgttagcgcgaactgtaaacgtgctaaatccagtgcttcaaacatgtcttttcctccttagaattgactcaaaaatacacacttgatgaatgtcttacatcgttacgcatgagatacacaaggattcatggtctctaaaatctctttttcgcgcacagctaatttatcgaaagtcacactttccatctgtcttacaagttcagcttgtacaacagacatagcttcattaactgcacattggcccatacatgcttttgagcaagaaccgacatcatacaaacaacgctgtaaatacgtatccccctcaacggctctaatcacatcgagcatggaaatatctttgggctcacgatttaatgcaaatccaccatccaccccgcggaaggatttcatgattcctgctgcaataaggctgcgcattatcttaagcaaaaaacgttctggaatcatctcttgctcagccaatacaccgccggttaccttctgaccagatggtaacatcgccatgtgcaaaatcatgcgaaacgcatagtccgtggcttgatttaatttcataagcactccttttccaataacaacgtctacgtattactacatttagtataaacgatataaaacaatactgcaatggtattgttttataaaactgtaattaatatcacaaaaaaggactattagtaagatactaatagtccttctcatttattatatgtagttctaaaagaattagccaaatagaagatgtcctacttcataagcaatggcagctactataccagatagtggaattgttacgaaccacgccatgaccatagaacgcgctacgccccagtttactgctttaatacgcttagaagcacctacccccaacaaagaaccactcacaacatgtgtggtacttacaggtaaatgcaagaatgtagcagtaaaaatagtaatagcagagtttaaatcggctgcaaaaccattaatggtttctaatttaaagatttttgtccccatggtggaaataattttccaaccaccaacagccgtaccacaagccatcgcagtcgcacagcacaacttaacccacaatggaacatctaaggtatcaatataaccaccgctaagtaaggtcaatgtaataatccccatcgccttttgtgcgtcattagaaccatgtgaaaaagccatcataacggccgatacgatttgcatggatctaaatctatcatttaaaacaataggagaaaatctaccaaagaggagtagcaacaatttcatgatgatatagccaccaaccattgctactaatggtgataagatgagagaaaagaaaatctttaaaatccctgattcatttaaagcatcaaaacctactgaccagcctacggcaccaatgataccaccaattagtgcatgggatgatgaactagggattccccagtaccaagtcagcaaattccatacgatggccccgataagggctgctgaaatgataccactattgataagagatggagacataacaatatcaccaccgattgtcttcgcaaccccagtactcaccatagcacccaaaaaattaagtgccgccgtcatcatgattgcttttttaggttcaatagcacgggttgaaactgatgtggcaatcgcattagccgtatcgtggaagccattgatgtagtcaaatgctagggctagaaatacgactagccaaactaagtaatgtgactcaagcatacttcaatactacccggcggaatgtaccaaccaaatcttcgcaaccatcgattacatcctccatggagctaaggatttccttccatttgataatttcaattggatccgtacattctgtaaataatttcgccatttcttcatggtaaatattatctgcttcagattcaagtttcaacacttgatgtacacgaccttctaccttcacatgatcttttttaaggctacccatgtaaccgatagatttattgatatgtttaacacattttacgacgatttcactcatgcgaatggcaccatcactaggtttacctacatgatacataaccattttatccatgatttctttgatattatcaagtgtagtatctaattgatcaatcaacaattggatatcttcacggtccatcggtgtaatgaatgttttacgcaagcgatcaactgtttcattaactaattcatccgcagctttttcttttgtatcaatttccaagaatgcttcttctttagaaacttcgcctttgaaaacgcgttccatcatttccgcactttcataggtaagttcagcatgattttctaaaatactaaaaaacttttcttcttttccttttaatttaaaagccatggagatcctcctgatacagtactgttagcttctataattacaatacaattatagcatagtaaatcagtgcgtgcctatctatttattgatttctcgcaccaaatgaggcatttccggaataattaatttactcatgccaagagtaacggctcccaccgaaccaggaatagaaaaaattaatgtattcgaatttacacctgcctctgcacgagatgcaatagctttggtaccaatatcctccgtaaaagaaagatacctaaaaatttcaccaaatccaggtatagccttttcaataatagaatccacggcttcaatggtcacatcacgcatggcaataccggtgccacctgtagaaatgaccacatctattgattcatcattacaccaaggaataatggcattacggatttcatcgtaatcatcgatgacaatctttcgagctactacattatgattagcagcttctaataattcttgaaccttgtttccgcctttatcagtttccatagtccgtgtatcagaaactgttaggacagcgacattgagaggtcgatgtaaaacttcttgagacatatatcctcctaaaacaatggtatcaaaccagccaattttgtaaatccattatcccgtaatgtatctcgtaattgccatgtataagtaataaatggcgcgcagtgcaaacgcatcaagaatgataaatacggtgtatcaccttggaatatggccaatcttggcaacgcatataaattttgacctggtttaaccgtccccggtgtgactgtgaaagccatcttatacccgctttcactagtaatgcgttgaatttccgcattattgaaaccaccaggatacgctaaataatcgatgggttttcccatgaaagcctgtaatgtatccttaccacctttgatttcatcatcaagtttagaaggatcaatgcgcgttaaaatactatgatgattagtatgaccttctacaataaacttatgagcgtccatagtttttaattcattgatagacataaaacgttttgtattaacagcatcgctaatcataaatatggttgcttgcatatcataggattctaagataggcaaaacatcctcatagttgtcgatataaccatcatcgaaggtgagaactatcggtttatcggggagttccttgccttctgtcacatacgcatataaatcatcgaggctaatcgtatgatacccttcgttatgtaagtactccatctgtttcttaaactgtgccacatcaagtgtcagtgcagaatgatacttatcattaacttgatgataatttaaaacgggaacaccataaagcttataatgcgatgataaacaccacatacttcctaatgctatgaatagtaatgcaatacaaataatgatcgtatatactatacgtttacctattgttattaacatgattaagaaccttcttacaatataaaattataacttcatactatttgaggataacataaccgctcttttgtttcaatgaaaaacccctcataggtcattctaaattcatataaataacctatgagggataacaaaaaaaggctaaccattcggttagccttttagcttaatcagcgacttcctatcactcctcactgtggatttctcatcgctgctttgcagctggagaaatcttacgttcggatgaaggtgatgtgtggctcccatgcgtcgctacgctcctctgttagctcacaccctacctttcccaggttccctggtcggataggaagtcgcacatgcaaaaaaaagacacacccttaggtgtgcctttagcttaatcagcgacttcctatcctcccaggccgtctccagccaagtactttcggcgtttacgagcttaactactgtgttcgagatgggaacaggtggaccctcgtagctatcgccactgaatctgtcagagtttgtactctgaaaaccacatagaagttatatatatttgttgcacatgtctgcttattgtattaagtaaagccctcgatctattagtaccagtcagctccaagcctcacagctcttccacacctggcctatcaaccatgtcgtctacatgggatcttactagcttatgctatgagaaacctcatctcaaggctggtttcacgcttagatgctttcagcgtttatccgtcccgaacgtagctacccaactgtacccttggcaggataattggtacaccagcggttcgtccactccggtcctctcgtactaggagcagcccccttcaagtttcttgcgcccgcgatggatagggaccgaactgtctcacgacgttctgaacccagctcacgtaccactttaatcggcgaacagccgaacccttgggacctacttcagccccaggatgtgatgagccgacatcgaggtgccaaacctccccgtcgatatggactcttgggagagattagcctgttatccccagggtagcttttatccgttgagcgatggcccttccactcggcaccaccggatcactaagcccgactttcgtccctgctcgacctgtccgtctcgcagtcaagctcccttctgcctttacactcttcgagcgatttccgtccgctctgagggaacctttgggcgcctccgttactctttaggaggcgaccgccccagtcaaactgcccgcctaagactgtccagccggttgttaatcggcctgttagaaatcaattaatcaaagggtggtatcccaacaacgactcctctaagactggcgccctagattctaagtctcccacctatcctgtacattcattaactaagttcaatcttaggttgcagtaaagctccatggggtctttctgtccagtcgcgggtaacctgcatcttcacaggtacttcaatttcaccgggtccctcgttgagacagtgcgcaagtcgttacacctttcgtgcgggtcggaacttacccgacaaggaatttcgctaccttaggaccgttatagttacggccgccgtttactggggcttcaattcagagcttcgaccgaagtctaacccctcctcttaaccttccagcaccgggcaggtgtcagcacctatacatcagctttcgctttagcaggcacctgtgtttgtggtaaacagtcgcttgcgcctctcttgtgccactcattcatgctccacgcgttactgcccttcacactacatgagtcctccttttcccgaagttacggaggcattttgccgagttccttaacgagggttttcccgcgcaccttaggattctctccccgcctacctgtgtcggttttggtacgggcgatgtgtctctacctagaagcttttctcgacagtgtaggatcaatcacttcgctgtaaacagctcgtcatcacatctcagcttttagagctacggatttgcctataactcaacctacatgcttaaacacgcacttccaatcgcgtgctgacctaccttactgtgtcactccttcgatcaaacgattcacaccggtacaggaatttcaacctgttgtccatcgcctacgcttttccgcctcggcttaggtcccgacttaccctgagacgacgatcgttgctcaggaacccttaggctttcggtggaatggattctcaccattcttttcgctactcataccgacattctcacttctcaccagtccacaactccttacggtactgcttcaatccgatgagaacgctcccctacccatatacattgctgcatatgacacgacttcggtttcatactttagccccggacattttcggcgcagagtctctcgaccagtgagctattacgcactctttaaatggtggctgcttctaagccaacatcctggttgttttggaaattccacatccttcgccacttagtatgacattggggaccttagtcggtgttctgggctgtttccctcttgacaatggaccttatcattcactgtctgactcccgagtataagtatagccattcgtagtttgactaggttcggtaaccggtatggcccctagcccgatcagtgctctaccgcctatactctcaacctcgaggctagccctaaagctatttcggggagaaccagctatctccgtgttcgattggcatttcacccctatccacaactcatcccaaagcttttcaacgctcacgagttcggtcctccacacaattttacctgtgcttcaacctggccatggatagatcactacggtttcgggtctactatcactaactgaacgccctgttcagactcgctttcgctgcggctccatgttttccacttaacctcgctagcaacagtaactcgtcggttcattcttcaataggcacgccgtcgtcctgatatatatacagacttcgactgtttgtagacatacggtttcaggttctctttcactccccgccaggggttcttttcacctttccctcacggtactatgcgctatcggtcgatatcagtattttggcttggagggtggtcccccctgcttcccacaaggtttcacgtgtctcgtggtactctggatacagtcccatgtatgcaaggtttcgattacagggctttcaccttctgcggctgagctttccaactcgattcttctacctcatttacacttgatgactgtcctcaaccccggtgcggttgcccgctccggtttggcctctttcccgttcgctcgccgctactaagaaaatctcgtttgattactcttcctctgggtaattagatgtttcagttccccaggtgccctcctcatactcaaaggtatgggtgacagtgcataaccactgccgggttcccccattcggaaatctacgggtcaaaggttgcttgcacctctccgtagcttatcgcagcttaccgcgtccttcttcggctgatatcgccaaggcatccgccgtacgcccttaaaatctttacttattttgcgccataatttgcgactatcttcgttgtactgcattcagctcatcttgcgtatacaaatacgcggcgatttcgcttcattggtacgcctcgatattcatcaaattctgacgaaaatcaatttgatttttagacatgcattagatacattgtcgttttttgtagccgtacattttcatgtacgtcaccaataagtcagagaattatttcctatgtgctcgggtcaacctacttagaaattctaagagatgaccttacaaatatatataataattatcttctatgcagttttcaaagaacaaacaatttatatatttcgcgtctatcgtcgttgcattcgtctcacttgtcttgcgtaattaccattacgcgacgacgacgttcaactcacgcgcctagatatccatcgaaatttattaaattgtaactgattgttaaatcagcttagttattttagtacaaaacagactagctgtcaaatactaaatggtggagacgaggagattcgaactcctgaccccctgcttgcaaggcaggtgctctcccaactgagctacgcccccatgagtggttacgctttagtctcgataatccattccgaagaatccgttatctttttaaagttatacctatgtttagctcttttgtctgtactctacacaatgtgtatttcaagtaatatgagccaactggtgggcctaggtggactcgaaccaccgacctcacgcttatcaggcgtgcgctctaaccagctgagctataggcccatatctgtagaattgagagtctttacagatctctcaaaaccgaacaatgttaggtgccaaagtgtcgacctaagtgacatccaagctcttggctcggtgtatgtctccctagaaaggaggtgatccagccgcaccttccgatacggctaccttgttacgacttcaccccaatcatcgactttaccttagacggctggctcccgaaggttaccccaccggctttgggcacttccgactttcgtggtgtgacgggcggtgtgtacaaggcccgggaacgtattcaccgcagtatgctgacctgcgattactagcgattccgacttcacgtaggcgagttgcagcctacgatccgaactgagagagtgtttctcgggtttgctccacctcgcggtttcgcttccgtctattaactcccattgtagtacgtgtgtagcccaggtcataaggggcatgatgatttgacgtcatccccgccttcctccgcattgtctgcggcagtctctcatgagttcccacccgaagtgctggcaacataagataggggttgcgctcgttgcgggacttaacccaacatctcacgacacgagctgacgacaaccgtgcaccacctgttttctggcttccgaagaagaggaactatctctagttctgtccatcaatgtcaagacctggtaaggttcttcgcgttgcgtcgaattaaaccacatactccaccgcttgtgcgggcccccgtcaattcctttgagtttcaaccttgcggtcgtactccccaggcggggtacttattgcgttaactccggcacagaaggggtcgatacctcctacacctagtacccatcgtttacggccaggactaccggggtatctaatcccgttcgctcccctggctttcgcgcctcagcgtcagttttcgtccagaaagtcgccttcgccactggtgttcttcctaatatctacgcatttcaccgctacactaggaattccactttcctctccgatactctagattggcagtttccatcccatcacggggttaagccccgaacttttaagacagactgaccaatccgcctgcgcgcgctttacgcccaataattccggacaacgcttgccacctacgtattaccgcggctgctggcacgtagttagccgtggctttctattccggtaccgtcaaatcctcgcactattcgcacaagaaccattcgtcccgattaacagagctttacaacccgaaggccgtcatcactcacgcggcgttgctccgtcagactttcgtccattgcggaagattccccactgctgcctcccgtaggagtctgggccgtgtctcagtcccaatgtggccgttcatcctctcagaccggctactgatcatcgccttggtgggccgttacccctccaactagctaatcagacgcaatcccctccttcagtgatagcttataaatagaggccacctttcatccagtctcgatgccgagattggatcgtatgcggtattagcagtcgtttccaactgttgtccccctctgaagggcaggttgattacgcgttactcacccgttcgccactaagattgatagaagcaagcttccatcgctcttcgttcgacttgcatgtgttaagcacgccgccagcgttcgtcctgagccaggatcaaactctccaagatatcttgaagctatttgaatagctcattatgtgttgtcgttacatttaagtaactttgaattatggttggttttgactttgtcaaaacccgcactctggcatatgttcaatcatatgattgattacctatcattgttcagttttcaaagatctgtacattagaagttttaacgttctaacgactttttaaagtatatcagtcatctcataaaacgtcaaccacttttttaagaagttttgtttcattttgaccacttgtgtttccacaatatacttaccatcataaccaaattctctaaaattagagatagaaaactcacaaactttcgtttgtgagttttatttggtggctcatccgcgactcgaacgcgggacaccctgattaaaagtcaggtgctctaccaactgagctaatgaaccatgttggcaggggtggctgggatcgaaccagcgcataacggagtcaaagtccgttgccttaccacttggcgacacccctacaatgattacgatgtgtaggttatggggtgagtagtggggatcgaacccacgcgtaacggagccacaatccgccgtgttaaccgcttcaccatacccaccaccttgtaggtatcgaagacactgtcttcgtaacaaagagaattatatctgttttagaagtttgtgtcaataactttttctaatttcatttaactttcaattttgaaattaacaagctatatacttctaatataaaactctttcacatcctaataaaaaggaagtaccaccgttaaaatgtttcttaacgaatggtgcttccctattatacatataaattatttatttggcaaatagttttttacaaaatttggtaatgcaaacgcagccttttgaatatccttgttatagtacttagtttcaaaattttgttcacgatttggttcccatgttaatgggtcgtattttttagatccaaccgtaaagcaatgcatcccggccggatagattggaatgtatgcggtgtacaaacgagcgattgggaaatgattatttacataaccaaacaccttctcaacgagcggttgatgaagcataggagattcggtttgttgtacaaataaaccatctgcttttagagctttcaacgtatttttataaaactcttccgtaaataatccttcaccaggaccaattggatcagagcaatctacaataataacgtcataataatcttcagcctctgccataaagccaataccgtcaccaatctttactgttaacttaggattgttttcaatcatagctttagaaatagtaggtaggtattgttttgccaattctacaactttaccatcaatctcaaccatggtaacttctttaacgcaatcatggcgtacgcattctctagctacaccgccatcaccgccaccgataatcaatacccgttctggatttggatgcaaaaacaatggtacatgagcaatcatttcatggtagataaactcctcccgttcagacgtttggaatacaccatctaatgcaagcatcatgccatattctttagacttaaatacttcaattttttgaaattcagattcaccagaataaagtacctcttctgcttcagcactgagacgtaaatgaggcgtttgctcttctgtaatccattgactcataataacctcctatataggtagagcgatagctttcaccatcgctctcataatactaatattatttcttagttatataacagaatccaccgccaaggatggtatctttcaaccaatgaactagtgaaaaatcacggatttccccttcatcaaaaataccgcaacgaatatcatcaccatccatgaacatcttataaataggcacccaatgccatgtatagagcgcaggttctttacctttatggcgatttaagaacgctacaggaacatcctgtgataatgcatcgtgaataaactgcgccgccgcctctacttctacgcgggatgcagaaaaaggagatacattaagcatgtgcacctcataaggcaaattcttatcatcaaacaaacgactaaggccgcgttccatccattgcgttttataaacgccaccaccaaatcttggttttacatagttccacacgacattcatacgttctaatgctaatgtatgattcgccgtagtagacacatctaataggccatctcgaaattcagaataactcaatacctgtgtagccgatgtagggccacaaccagacaaacgttgccattcatcatcaaaccattcttgatcatagccgtgtgatatagtcccatttacatcgatatcaagccactccggatgtttaacagatacatcattcatgagattaaccttcgattacttccactgtttccatgatatcgccttgatggataccatcaactacatccatgccttcgattactttaccaaacacagtatgtacaccatctaaatgaggttgtggttcgtatacgataaagaattggctaccgccagtattaggaccacggtgagccatagacaacgcaccgcgttcgtgtttatgaggattgccaatcaattcgtctttaattgtgtaaccaggaccgcctgtaccattgccattagggcaaccaccttgcgctacgaatccaggaattacacgatggaatgtcaatccattatagaaacctttattaataaggtcgataaagttttgtactgtgccaggtgcttctttgtcaaataattcaattacaatgtctccaccttttgccatatggatttttgcttgtttcattgttcaggtacctccaaaattgtacgcaacacatgtgctgctaatataaaacctgccactggtggcacaaaactacatgttcctgggctcgttgcttcgccgcggaactgtggttttgtcggtttttctgtagaaaataaaactaattgtttttttataccccgtttcttaagttcccggcgcataacgcgtgccaacgggcatgtatgagacttattgacatctgcaatcataagtttctctgggtaaaagcgattaccgccacccatacaggaaataacagggatgctttcacgttgacaaacctcgataatattgagttttgccgttaccatatcaatggcatcgatcacataatcaacgttcaagctttgaataaattcaggatatttctcctcagtatacataatatcgtgagtttctatcactacatcaggattgatggaaagagctcgcgcctttgcgacctcaaccttacgttctccaatggtatcgtgtgtcgtaatcatttgacgattcaaattgctgggtgcaatggaatcaccatcaataataacgatgcgccctacaccagcacgtactagagcctcgagggccccaccgccgacaccaccaacaccaaagagtgcaatagatgtatcctttaatgtttggattttatcaggaccaaccaaccactctaaacgagttaacatatattccattaatatttacccgccggaatgatttctgtccaatatccatcaggatcagcgataaaataaatacccatgtcggcattttcataggctacaacacccatctctttatgtttttttagagctgcttcgtagtcatctacataaaatgccaagtggaattcattatcccctaaattataagggcgatcccaatcgcgcaaccatgtaagttctaattcatgtgccgtatatggactttttaaatatacaagggtaaaagcaccgcttgggtcttccaagcgacgagcctcttcaagcagtaaggcctctttatagaaggctaaactcttatcaagatccttaacatttatattattatgagcaaatgaaaacttcataggacctccttatgtaaatacagtatatttttgtaggaattatcctcttttaatagtatcacattttgtaaatgtatagctagttaatcacaaattttgccgtactaccttcatcaccacgtgtgacttctaaatgggcaggtatccgcgtctttaactcaggtacatgggagatcatgccgataaggcgccccgatgattgtagttgtaccaatgtttccatagcgagctccaatgtatcaggatcaagtgtaccaaacccttcatcaatgaacatcgtatccatatgaataccaccggcataactttgaatcacgtcggcaagacctaaggcaagtgccatagaggccaagaatgtttctccccctgacaaggtattcgcaggtctagattgtcctgtgaaagcgtccattacggccaaatcaaggccttgcttaccacggccgccaccggtatagtctgaacgctccaaagagtaacggctacggctcatcttttgaagacgtaaattggctgcatacacaacctcatctaaaatggcccccaatacatagcgctcaaaggtgacatttttaaaaccttgttcacccccattagcgagatcattcaatcgacttaagaaggctaccttctctcgggcctcccccatagccgattcaatttcctctagtgaagcaagtgtagtttctatatgctgtgtttctttatcccaagccgctaaatggcccaccaatgtatcacgacgttctaccgctgcatcatatacttcatccgaaacggtatcgctaggtttaaccacagcctccgtagtctttagtgccgcatcatatacagcttgtgctgtactaaaggcctcttccaagtcatataacttagatttaaaatcctctaacgcattaaagtcactcaatgcttctacaaaatcaatttcacttaacgatatagattgcaatgactgtatatattccccatggagcgaatcaagattcttttgttcttcttttacttgagaagataagatttctagtcgacctcgtttagcacttagctgccctcgagcctcctctaattgttttgtagtcactgttaactgcgcatcatactctttaatttctgatgctaagaatgtcacttgcttacgccacaactctatatccgtagtaggcaacgactctgataaggaatctatttttgcttgtacagaactgatactaatctctagttcatgcaatgctttaagcaattcattatgcgcaagttctgatttagccaacgtatccttagcgatgcttaacctacgctccgcatcagaaatagtcttacctagctgttcagattcaccacgtaacgttttgaatcgttccatttgagataacagaacttgttgaagcgatgcaaagttttccttagaaaaaccatctatagaggactgaagaatcgaaacttgtgcctccatatggttagataattcatgcatccgccccactaacgcatccctttgacctacttcattcgcttgttgttgtaacgctttatcacgaaggcctcgagcagcttcaacctcatccttagtaggatataattctggcttagttgctaaatgaggatgttctgtagatccacatactgggcaaggctcctcttctttcacgaaaggaaccaattcatacgcgcgcccttcttgcattaaatgctctagccgctctaaatgtaccttcgcctctttcactgttgtatcaagagctgctaaggtctcatccttaatgtcgatttctttttgaacctgactaatttcttctaccaactcagaatatctgtgcacatgattaagctgttcttgaataacaggaacctgctccagtagtgtactattctcttgaaagcgtttacgtaaaccctcaacatctacttctatctgtttgatgagctgccgttgtatctctaggtcagcttcactctttttactatccaattgttttacattaccacgtagtgtagacatcttttttttcaacaatcctaactcatcaaacttttcagactgttgttggagttgagccaaagtagtcctcttagattgtatcgactcagcttgagattctaacgcttcatgaacctctatacagttagtctcatgttgagtagcagtgtccacacttttttctgcatcggacagtgcccgttttaatgttgttaaactagactgtttatcaatgtattgttgatacaatgcatgaactggaaataaggaattgaggaattgaaccttttcactcaattgtgtgcgctcaggttctttagttttcaccaaatctaattgggatgtagcttgtgctaaagattgttgcgcttgattatatagggcccactccttacgcaaggcattaaattgttctacctcattaacagccctatctcgttctactacaagtacatcacgatgtggtactcgattagataacagtttacgtacatgttcgacagttagcactggagtctcttcatcgtgaggaatagactgtatcaacgccgtttgtttcatcatattttcttcaatgccagctttttcgtcatcataagctgatttaagagcctcttgtagttttcgatataactctgttctaaagagcgtatgtagtaattcctcccgttcatttgtagaggcgacaaggagttttctgaattccccttgtggcaatagaaccacttgtaaaaattgatccttccgaaaacctatgattcgttgaattgtatcacgaatggcagccgcagaggtagcaacgaccttccactcaccatctttcatttcgtatacagtagcgctagcgttctgttcccgcataccggtgccacgttttttggctaccatttgttttggtagtctttcaacacggtattgagcatctccgatggcaaaggaaaagtctacgcgtgtcatccgctcaggttcagcaaaatcgctgcggatagcatcggttttccgcacttctccacttggttcgccatacaaggcgtacaccatagcatctaaaatggatgttttccctgctcctgttggaccggagatgaggaacatagaatgattttctaatttactaaagtccaatgtaaccgaatctcgatacggaccaaaggcttctatagttaaagatataggcttcatctagtcctccttgataattcggtcccacacagagtcgatatatgactgttccgcctctgttaacggctctttccacacggtttcagcaaactgattaaataattgacgctcatctagctctttaaatacggcatctcccatatctaccacaggtgttgctatgcgccctgccaattcaatggtcatacatcgatgataaacctgacgcaacttagccatgccatccatgataggcatcgtatctaggaggcgtgcctgcacgtaatcatccttatgtttcgtttggagggctgtattatttaaaaggtcctcaaaataaccttccaagatgactacatctcgctttgcctctacagggattgtactaatatctaccttcccctttgtatccatatcaataatagtaaaagatttcttctgctcatgttcatcaaaggaatacttcaatggcgatccgctatagcgaatatggtctgcccccatccgttgcggtccatgtaaatgtccaagagctgtatagtgaaagtttttaaaaacgtgagggctcacctgttcactaccacctacagacaatgttcgttccgaaccacctacttcgccacccattacaaaggcgtgactgatggcaatgctacgcatctgttttggcacttgtttatatagataatcactccaagcctgatacatttggtcataattatgtaaattaagtgcgaccgcttcttgatccttatcatctacataggaaaataaagtatcatcagtcatatccgcatcaactggttttgattcactggagctcagtcccaaagcgtcacctatacgacgaggttcgctaaacggcataggacaaatggccaccctaccatcaaagccttcaaattcaaagggttgtaatgcatgatgaggggagccccaaatatgaatgcccgattcacttagcatagatcgtcccacttcaaggcgttccgctccatcgtggtttccactcactacaaatagaggaaccttataatccatagcgagacgagtaatgatagagtcccataattcaatagcttcaatgggtggtaccgacctatcaaatacatcccctgccagcaagatgccatcgattttttcttctttcaaaatagtaaagaactgatgctccaacacatgagcttggtcatctgttaaatactgaccataaaaaatacgccccaaatgccaatccgcagtatgtaaaaaacgcatttcatccccctttccagttctccctataccttatatatttagtttataccaattattatataactcaatttattttgcttgattattgattatctacgatagagcgcaacatagcaatttcttttgcatagccatctaattcatttggcgtttctaaatagaatggcaagctcgtcagtttaggatgtgtcacaatacgagcaattgcatcgataccgatatgaccttccccaattttttcatgacggtctttatgagcccccataggattttttgaatcgttcaagtgaatcgctttcaaacggtcgagaccaacaatacgatcgaactcgtcgatgacaccatctaaattattaacgatgtcataaccaccttcgtgaatatggcaagtatctacacaaacacccatgtactcttttaattttacaccgtcaataatacgagcaatttcttcaaaacgagagccgatttccgtgcccttaccagccataacctctaaaagaaccgttgttttcatgcctgggaataagatttcattcaagcactctacgatgtattcgatgccttggtcaacaccttgctttacatgactaccgggatgaaagttatacatctggcctggtaaatattccatgcgttctaagtcttctgtcatggcttgttttgcaaaagcgcgcaaatcttccttagctgcacacggattatacgtatacggtgcatgggctaacaaggtaccaaagttatgttctttcatatacgcactaaggctattcatatcctccacatcgagagcacgcatactaccaccgcgcggattgcgtgtaaagtattgaaatgtattaccaccaatcttagtggcttccttccccatatgtagatatccctttgatatagataaatgagctcctattgtaaacattatatatcctttcaactctatatgactcaaaaaccccctgcatgagtatacgcagggggcatctgttagtgactttcttttttagcacattctgggcatacgccttcaaatgtaatttgctgtcctgtaatttgatatgcactagctttgccagccatatcagcgatagcatgaagatcgacattcatcatatcttctactttgttacaacgaacacagcgaatatgtgcatgagctgttgtatcccaatcgtaatgtgcgcgttcatcgcccacttccaatactttaacaaggcctattttttcaaaaatttccattgttttgtatacggttgccaaactcatgcttggatgtgtaggacgcaagctatgataaatcatctctgctgttgggtgattgtgatgaccacgcaaagcatcataaattgcaattcgttgaggggttaccttaaacccttcgcttcgcaaaatttgtgcgatatccataataatctacctttctccacttggaaacatctcggtactctatcgtccattttcaaacaataattattatttattgtaccattctagtagattttaggcaataaaaaacgtggatttatacaattcacgttttcataacttgtgtttaatagcaatcctactatgaatatacattaaacaaagttcataccatattagtctttaaagtacggtttaaaaccttcactttgatgacgaggtttacgatcacctctagggcggtcgctacgacgatcatcgcgacgacggctatcacggcggtcacctttgcgatcatcacggctgcggcgcggacggtcatcacgacgacgatcaccatcgcggcggcggtccccatctctacgacggtctccatcacggcggcgacgatcaccacgaccaccttcacggcgacgacgcacgcgtaaaggtttttcttctgtaatatttacaggtgttgtatccggttctttcgtaagcaacttgagtgctgccgcaatcaatgtaacggaatcagtatcattcaataactcttccgcatttaccttaaacggtgccaactcttctgtattgccagccatttcaattaagctttcaacagcaaggcgttgttgaccttccaaaacttcgcccaaagatggagcacgacgtttcgcaattttacgttttgttaaacgttcaatagcatgaaggtgttcgatttcacgagggataacaaatgtataggcttcacctgccttacctgcacggcctgtacgacctacgcggtgcgtatagctttcaggatcttgtggcaaatcatagttatatacatgagatacgccggaaatatcaagaccacgagcagccacatcagtagctacaagaatatcaattgtaccttcgcggaattgacgaattacactatcacgtttttgttgtgataaatcaccatgaataccttccgccatgtagccacgttttttgagggcttctgttacttcatcaacacgacgtttagtacgtgtaaagatgatagccaactctggcgcttgtaagtcgaacaaacggcacaacacgtcaaatttttggcggtcttgtacttcgatatagtattgttcgataagatccatcgttacttgcgtaggtttcatacgaatcaacgttggctctgtaaggtatgtttctgctaactcgcgaatcgccttaggcattgttgcagagaatagcaatgtttggtgatcttctgggatagcccctaaaattttgttgatgtcatctacaaagcccatgtttaacatttcatcagcttcgtcaagaacgacaatcttaacgtcttcaaatttaatagaaccgcggtccatatggtccatcaatcggcctggtgtggcaacaatgatttgcggattctttttcaatgcacggaattgacggttaatatcttggccaccatagataggtaatgccgtaatatccgtatactgagccattttattaagctcttctgctacttgaatggctaattctcgtgtaggggacaaaatcactacttgaacgtgacgattactgccgtctacgcgttccaatacaggtaggccaaaggccgctgtcttaccagtacctgtttgagcttgaccgatcatgtctttaccgctcatggctactgggatagcttcctgttgaattggcgtaggctcttcaaaacccatatcgtttaacgcacgtagaacaggttcgctaatcattaattgttcaaatttttctaacatctaaatgtgtttcctcctatcgcacacgaattatgcgcgttagaatagtatatcatatttcgatggtgaaagctacaaaagtaattctgaatctaaattaaatatgctttcttctcccaagaaaatgttccattaaaacgattccacctgatacacatagcaaaacaatatatgataggttaataggagtatacaagcattcaacaagaacaacccatataattaataataatttagcaatccattttgttgttattctatccgctatcataaatatagataagttgataattattttaatgattatcgcagcgattataacgattgacgtaaattcttctctataatctgtcaattcatataaaggatataataaataactcaaaagagcgctaagtattattaagaaccaaatatttattccctttaaaagttcagatttactatagtaaaatatgccaactaataaaaagagcaaaatactaagtaatatccctataattaatagataatctaggtgaatcatggtgtatacggtcctctcaaaacaacacgatttcgtatggctccaattataacatatagtatacttttacggacaatagacttgttacgtacaaaagagacacctcatttgagacacctctttattatagtttattagagagttatatggtattaatcaactatatgagtaaacatataatttaggtataatataattaaaataatgtactccaaaattccgctaataaattaaacaatgcctgtaaagtaattacgatttactgggctttctaaagtagtataaaaggaatatacaatgaaactatttgccctaaaacgatttatattattgccgctgattatcgtctcactcatactaacaacaggttgtcatctcctctcacattatagtgaggatgaggtacaccaatatataaataagaactatcctaatctgacctatcacctagagtcacgatggggcaatacatggcaagtcacctttgacaagtatccacaaatgcccattgaaatatctgaagggatacacacctctgcacctgtagtgccacaagtcgaccgagtactgataaccaatattccattaataaccgcattcccattaatgaaaaactatctaacaacagaagaattatcctatgctacatacgatacatctactttgtatattgaaatgccaattccttattcagccatagaaaaccatgatgtaacaaatttttacaatcgaatggatcaattctgcaaagaatatgctgcaacatatccagatttcaaagaaaaaatatatattagagtcatcataaaaccatctgatggttctgatgcaccggaagagtacagaaaaatattccgcttatcccaatattaataaagaaattatgttaagtataatactattgtaatgaatacgcctttataatcgaaggagatccattgaaatgaaaatacagcataaagcctttacaactatggtgtttctcgctatactactcaccacatctggatgccacctattcacacactattctactgaggaagtaaaagaatatatatctcaaaactaccctcatatgacttacaccatagaaaaacacattaaccacacctggaccgcaaccttcgacgcctatccaaatctacctattttaatacaggaagaaaacgtaaattacgatggtggcggcatccctattacagataaattcatttatacaaatattcctttggtaaccatataccctttatttcaaaaatatctcaccgatgaagaattaaactatgtatcttataggagataccttttcggagaagatgcttggagtttcagcctcactattccatatgatgcggtccacaatcatgatattcaaaacctctttcttcgcatcaatcaactttgtgaggaatgtaaaaatatgtatcctcagttcaacacaacaatgaatattcgtgtagaagtaaaatcagctgatggttcacctaccctgccagaacatttaaaaatatttaacgtcaacaaaattaaatagtgctttaaaaggttttcataaaacgatggcttctctttcatttaatatacatatgtctgattataataatcagtatatatattcattttaatttagagagagaggaaattatgaacggaatcaattggacacatctattaacactcaccttatcccctgaaaaaggtagcaatgaactcaaaaacacgggcaaccttagtgaagccctaccaatgggtattattacatatgtagcaatggcaatattaacctatatcttagcttgcattacaacaagcattgtaggctataaattctttaccatttttcattcactaccttgttgggtcttatatttaaaggacttttgaaagctatcattcctgctctactagcaagctatatctttaatttttactgtcagcgtacataccctacagtaaacgtaaacttaccagatacaattaaacaattcatgtatggtgtaagtgtatatgctctacttgtgttagttcaaaatatcgtgctcatgccgttcatgataggtatctatacggccacattcccatatggtctagtaagaacagttatattcatcttaaatgttttagtatatgggtggaccgcatttactttattaaaactatgtattgcagaatacaatatgtctgtacgcgatacagcaataaccttagtagttagtatcgttccactcatcgtgatcaactacataatcaagaatgtcttctaatgctatggaaacaaaattataaggaataactcgaaagggactgtaacagaatgcggttttaccgcattctagttgcagcccctttaaaatataagaaacacagaaaattggggttataggacaaaatatacaacgagccattaccaatccacactgcactaacgtggtatgaaattgataaacctattaaaatagggccgataatatcaaaaaaaatacgcctcataataaaccactatacatgtataaataaggaggtaatataatccttatctatgttagagtaattaatagttaaatatgtcaaaatacacaatagaggcatgtttatccatatctaataaacacacctctattcgattagataaataactattaatataactcagccaagaaaataatagcaaacacccacaatacaacgccatatgtcatatttgtttttactttatcaagacttacctttccattctgtaacaattttcccgtcatactataagggatcatcggccctggaaccaatactgtaatgtaaaactctaggctttgagctgtatattctacaccatttaatagatacttaacatcatatccataaataactgtaaaattaggaagttctttaataattctaggcttaactgacaaaatctctacggaaataccttttcgacgacaccagaaacgatatgtaataaaatatgtcccccaaatcataagaactattgccacgcaaaactgccatggattaacaaacattgtttctcatcccttctaaagttgattttgatatcctacgaatttaaccacggttcgatttacagatatatatgcaccagcttcaacaccaataacatgtaaagtataaccacctagtgcattaccggccatacgtgcagcccactcgccaatcacaccatgggcaaaagctttagcaatcttgccttcttttgtggtaggttgacagttatgtaattgctcataaacatttttagcaaataaacgtaccaactcctgacgttcttcaattttctttttatcaaatatcttatctaattgatgtaacgtattctctgtattggtattaatcgtcttagtatcaatttctttaccatctactgttagtataccatcagaaatggcagattgagtagtcgaactggctttacctttagatcctacgcctaagtttggaactagatacttttggtttgaggggtattatgtaagtacggtaggttttaatgaagctaccgtaaaaaaatatatacgtgagcaagagttacatgaccaaatgaaagataaacttagtgtaaaagaatatgagaacccttttaatggtagcaagtaatacatatcccctttacggggaccgtaagtaatacaaatcatttgttatcataagaaaaatctaaagacaactgaccttcagaagttaaaatataaaccatactagagaatggattttgattgtagaatttaaaagtttctatcatgtctaaaatctcatgctttaaatcatacataatttctgaaataatagcaggttcatcattattgtcttctacataccgtgaaattggggtattattatcagcccgataaattgaaagttctactgaagaactattattatgactttcaaaatgcaattctacaaaagcccagtctaatggagttaatttaaatatttttttcgccaaagcattataatgctcctcgagctcatcttctaaactcttatgttctaatctaaaggcattgtctatgtcagtataattttttgctaatatacgggattccatatcttccaataataaaacacctcgaggaccttttatcatttctttatatacatccggttcgaattcctcttctctagctagaacaccaaaattctgatattcccacttatatctattttgaagccaacaatcgtcagttacaggatcattatgaaactcacaatatggctcataatcatcgcgtgaaatatacattgttccccacgtccattgttctgtagaagcttcatgaagtaaacgtacatacgtcaaaatctcactaatcccagcttttatagattttactttttcatcactacaattatataacaaatcaccatcagtaataatagaacccgaaggagtcttaacattataacaagcagaactcattcctgattctgtacattcaaaaaacaaatagaccttataccaatatttaggcatacactctaccaatatgtctcttatcttattaatatatctatccatagcaaccaaattatctatatcaccagaaccattaaatatctttgcaattaaatgtccttcttgagcttcacctatcatcaattcttataatcctcctaaagaaatcatatccaccatttatataatcacctattgataattccttatctttaaagtatggcgaaaccggaaaataaccccaaacaacacctaatcccccacatatattacggccaccatctccacctttataggaaaatccctcatcatcatatacaatttctctgcagtatggatcatcaccgataatcaatccaaaaaagttttccttttctaatgtatactctccatcattatccatccattccatatgttttaaattcatagagaaatctatattattcccccaaggaaaaatggttctacaccccttgccagataaatactcccattctctttgtgtaggaagagagtatccattatcttttatgttttgtaacagtttcttaaatgtggtgacttcataatatttgccacaccaattgctatcatctgttttatataagcaaactgtgttgtgaaccataacttcagaaaggccttttatctcggcttttttaatcatattttgccactctttattttgtataagttcctcatcggaaataggtatccaacaggtttcactatacgttttttgtactaaaagcggatgtattataaattcaccctcttgggtaaaattatgcgtaagataattttctatgttagatattattgcctcatctgccagtgcttcgctaatcttagttaaaatatcctcttcactataaatttcatcttcgtaaccatctaaaaatacataggcaagatccattaagctttctttatcaaaaatatcttgcaactttttattgtcaaaattaagaccgagcctaacggtatccccaggaacaaatacaaaatctatgccatcatatgaacgatatattgccgtataggtggatttaccaaatgcatcaaattcatcaaaatatagtaactctaaattatatatttttccgatttgacttaataattcttccttatcattaatagataataaatcatattggggattatacagttttttgaaggaaatatgattcattgtctctccagtttcttctacagtacactcttatatgaccttaattataacatatggtatacatccatatataaaagactggcctcaagctatgccaaaaaaggcacctcttcgaggtgccttcttatcaaatatacgtaaaaggaaaatctattaaattattaatctaaatcataaaacccagatggtttatcactcaaatttacaatgatgtttttcatttgagtgtagtgctcaaggataactttgtgagtttcacggccgataccagattgtttataaccaccgaacggtgcgcctgctgggatggagttatatgtattaacccacatacgacctgtttcgattgctcgagctacgcggatggcacggttaaggttttgtgtgaatacgccaccaccaagaccgtataagctatcattagcttgttcgattacttcgtcttcgctatggaatttaatcactactgccaccggaccaaagatttcttcacgagctacgcgcatatcgtttgtagcatccacgatgagtgtcggtcttacgaagcaacctttgccaagttcgccatctgtaatacgttcaccaccagctacaacacgagcgccttcttccttagcaagttctacatagctaagtactttcttaacttgtgcttcgtaaatcaaggaacctagttgtgtagattcatcccaaggcaatccaacttttactttatcaaataatttagaaagttcagctacaaatttgtcataaattgtatcttgtacgaagatacgggaaccagcgcagcacacttgaccttgattgaatagaataccgagcattgccccatcaagagcttgtttccagttcgcatcgtcaaagaagatattcgccgatttaccacctaattccaatgtagcaggaatcaagcgttcagatgccgctttatatacatctaggcctacttctgtagagcctgtgaaagcaagtttgctgaagcctggatgatcaaggatatattggccagatttagaacctttacccgttacaatgtttacaacacctggaggtaagatgtcttgtaaaatgctacctagttctaacaaactaagagatgtatgactagatggtttgataacaactgtacaacctgctgctagcgctggtgccaatttccaagcagccattaagaatgggaaattccatggtactacttgaccaaccacgccgattggttcacggataataaggctcaatgtattttcatcaaatacttgtgccgaaccttcttctgcacgaagtacgccggcgaagtaacggaaatggtctgcaccaagtggaatatccacgtttaatgtttcacggattggtttaccattgtcataggtctcaacttgtgccaaatgttctttgtgagcatcaatggcatctgcaatctttaataaataatctgcccgttcgacttgagaaactgttttccacgttttaaaagcctctgttgcagctgctacagctttatcaacatccgcctgcgtagcttctgcacaaacagcaagttgctcgccattagcagggttatatacattaaattcagcaccatcagatgcaggtacccattcattattgattaaaagaccatatctttctctaatatgtaaactcatagtacttcctcctttaatggataacgactattaattatcttctatgagttcatcatacacccaatatctaaatacttcaatctattttattattttcgatatagagattttattgtattctcaatagttttattctataccaaaatcgatatacttatcactatttatgataacacagtacacaaaaaaggagtcctctattacctaaaggactccttttaatcatgttcaattttgacatgtataattttttacgaattcccctaataaaattaggcctttttcttgtctttatttctcaatgacttgacggataatccgatacgatttcgctttacatctacagagatgatctcggcttcaataatatcgcctacagcaagtacatcagaaggatgttgtttcgccgtgcatagttcgctacgatgtaataaaccattcgtttttaaaccaaaatcaataaaggcaccaaagtctactacattatgcaccgtacctttaacaaccgtaccaaccttgatatcctcaagacttactacatgtttacgtgtcagaggtgctggtaaatcctcacgagggtcacgacctggtttagcaagagctgcaatgatatctcgcacagtaggaatacccgcatcaagcttatgcgccatcttatctacatcaaccaatggtaatttgacctgtaatgcttcaagttgggatttatcctgtaaatcctttaatgtaaaacctaattcactaataatacgttctgccaactcataggactcagggtgaacagatgtattatccaatggattcttagcaccatttaatcgcaagaaaccggcacactgagtaaatgctgcaggacctaagcgtggcacctttaatagttgcttacgactagtaaacccaccattttcttgacggaatgctacaatattttttgctaccgtaccagaaatgcctgcgatatgctgcaaaatcgccggagatgccgtattaagctctaccccaacatggttaactacagattcaacaacttgatccaatgtatgagttaattgtttttggttaacatcatgttggtattgaccaacacctatagatttaggatcgattttaacggactctgctaatggatcttgtacacgacgagcaatagatacggcgccacgaatcgttacgtctaaatctggcaattcatcaatagctagttttgatgcagaatatacagacgcgccagcttcattagtaatgatgtagtggcaatctaatttttcctcttcaatcatcttagacgcaaattgttctgtttcatacgaggctgtaccgttgccaatggacaataaggtaacattaaatttgcgaatcttttccgctaatttcttttgtgcttcttgttttagcttttcactatttgttaaatagtaagcaccataatcgagtacattgccttgtgcatcgataatagccatcttacaacctgtacgataccctgggtcaaggcccataataacatgacctgccaatggcggttgtaacaataaatttttaagatttactccaaacaccttaatcgcttgctcatctgcagattcggttaattcattgcgaatatctcgttcaagagcggggaacatcaagcgtttatacgcatctgctacggcgctagctttcacatcacaaaaaatagattgttcattgttagtaatactacgcaccatatattgaatataggattcatcgggtacggttagggccaatttaagagcccctaatttttcgcctcgattaaccgccaagatacgatgggacggcatctgacgaaccggttcagcatactcattatattgaaggaattggtccttgtgttcattatcttccacgagttccgcttggataaaaccttccttccacatacgcttacgaagagtagcacgaaaatcggcactgtcgctgacgatttctgcaacgatgtccgacgcaccttgaatggcatcctctggcgtaggcacgtcttcagaaatatattctcttgcgatatctagaggattaccagatgtgaccgtatcattcaaaatcatatctgctaaaggctctagtcctcgttcacgggcaatcatggcccgtgtccgtttcttaggtcgatatggtaaatacaaatcttctaattcttgtaattttacggctttcatcaaagatgccatcaattcatcggtcatcttttcttgttccgtaatagcattgatgatttcttggcgccgtgcttctaaattgcgcaaatatttaatgcgttcttcgatagttcgcagttgttcatcttgtaattcacctgttacttcttttctgtaacgagcgatgaatggcaccgtgttaccttcatctaagagagtaactgctgattctacttgaccaggcttaacacccaattcctttgcaataatggcaaacattgattccattagttatgtccttttctttcatatgttacaaatcgatgaggatatgtatttttatcatctaccgtcccctctacaacggaggtaattgtgaaagctgacgcatcaaattcagggaaatgagcatctccttcaaattcatggtcaacctccgtaatgtgcattacatctacatatggtaaaaaggcttcgtagatttgtgcaccaccgataacatagaccacatcaatctctttagcagcctctacaacagcctcgggtgaagaaaatacacgtaccccttccggtgcattaaaacctttattttttgtaatcacccaatgttcccgattaggcaataaaaagggcaagctttcaaaggtcttacggcccataataataacgtggcctgtcgttttttccttaaagaatttcaaatcattgggcaaatgccaaatcagagaattatctttgccgataacgcgatgatgcgccaccgctacgataagtgctaacatagtatccccctatacggctacggtcatagccaatttacctaaatgttcatacccttctaacacgatatcatccggtgtgaaatcataaaagtcagtgatatctgaatttacacgaatttttggagctggcaacgcttgatctcgacgagataattgctcacgcaatgcatccacatgattttcgtaaatatgtgcattattaataacatgggtaaacttaccaggcttcaaaccagtcacttgggcaatcatacataagagggctgcatattgagccgtattaaatggaaccccaagccccatatcaccactgcgttggatgagcatgcagtttaaatagccattgcctacatcccacaatgtttcatacgcacaaggttgcaaagccatatctggcaaatcctcaatattccataaggtaacaatcatacggcgactgtctggatcttcttttatggttttgatgagattatctaattgtttatatttagcgatttggtatccataggccttgccaatagtcccatcttcgcgcatccattcatcccacacatggacattcatatcttgtaatttacgcacatcattggactgcatttgccaaatccataacaattctttcacagctgttttgaaagccacaaattttgtagttaaaattggaaattcctcttgtaaatcaaactgcataatttgttgtggcaatttatatgtggctatgcctgttctattttgaccatatatgccatgatctaatatattttcaataatattgagatattgtgtatctgctaagctcatagttccccctaatcatattagaaatcactcaatatagcgttatagaaacgccaatttgttaccccttatattgtgaaatggcctctaaaaatgaaagtccatatttctttaattttgcttcccctacgccctttatattgccaaactcacctaatgtttttggccgtatattggctaaatcgataagcaccgtgtcagggaatataatatacggcggcacactaagttgcgatgccaattgtttgcgatgttgacgtaaatgttcaaatagcccaccagaaccagaacggggtacttcggagcgagagatagaggctgattttttcgttttacgagatggcacgatgacctcttgcctaatttcttctacctctttatgccctgctaacacctcttctgcaccggcggtgacggataagaccggatattttcccatagaactccgcaagtatccagaggccacaaattgttgtatgaggcccttaatctccttatcccctacatctgataaatacccaaatacagataaggcatcaagacctgccctcgtaatgcggtcagtccgttctccgcgcacgatggacgaaatcatagaggcaccatagcgctcctcggtggcgataatggcacggaatatggcctttgcctctttcgtgacattaacacgttccccttttgtattacaggaactacagttactgcattcgagccacggaacgatttcaccaaaataggcgagcatatattttcttaggcaagtactacagaaacagtaatcaatcatagattgaagttttctaagttccacctgctcacgttgtggttctaaatgaccttgttcaatcaaatacttatgaacgcgcacatcttgtccactatagagcagaatacattccgccggtgcgccgtcgcgtccagcacggcccgcctcttgataataggactccatattacgcggcatttggtagtgcaacacataccgcacattactcttatcgatgcccatgccaaatgcgttggtagctaccataacttgtaattggtcgaaggcgtatttattttgcatatctttgcgcatctcatcggataatccggcatggtaatatccagtttggattccggcacgcgtcaaattatcgtagactcgttctacatccttgcgcgtagagcaatagatgataccattttcatgactatgacgccgcacataatcgactacataatccatgcgctttggtgtgcgcacgacggaaaacgataaattcggcctatcaaatcccgtaacatacacattcgcatgatcgagacctaataatgttttaatatcattttctacagccttcgtagccgtcgctgtgaaagcccccactacgggacgcttaggcaaactagctaaccaatcacctatcaatcgataggaaggtctaaaatcatgaccccactgtgaaatacagtgcgcttcatcaacaatgacttgagagataggcatagagcgtaacacattgcagaaaaaattagaacctaatcgctctggtgcaatatataataatttaatattcccactacgtacatcgtacatggtcttattaaattctgtttgcgttaatgtactattgattaaggcagccggtatattttgatccaccaagccatcaacctggtctttcatcaaagatattaagggcgagaatacgacggtaagccccgatttacaaagagctggaatttgaaagcatatcgatttacctgccccagtaggcatgatggccactacatcctcgttctttaataaagactctacaggagcctcctgagcgggccgaaaggatgtatacccaaagtatgtttgcagtagttgtaacgctctatcacgagaattaatagcctccatcggtatacctcctttcctatgtgtacaaaattaacaatgttatatgccatatcaaaatgaaatatcgtgtctatttattgtatcatttttttaggtgttttttgaattattttcatataatactgtttagtaattttaacaatatcatcaatatttaccaataaattatatgatttacatatcctatagaatggcaatttgtgatacaataattagtatgtattttaacatggtgaacaaccctaaggaggttttatataggcatgacacacaacaacataatgatcataatcgcctttgccttgtatttaggactgatgatgtacatcggggtctactattatcgcaaatcgaacagtattggtgactatatattgggaggtagacagctaggaccgtggattacggcactcagtgccgaagcctccgacatgagcggttggatgcttatgggggtaccgggtctggcctatactacgggtatttccggtgtatggattgctgtaggacttaccttgggcacctgggccaactggcgattcgtatcccgtagattgcgtaaccatacggaggtagctagcgacagcttaacattgccggattatttaaaaaatcggttccacgatcaatcccattcggtagctgttatttccgcattgtttatattaatcttcttcctcatctacacatcctctggatttgtggcaggaggcaaattattcaataccatcttcggtttagactatacggtatctctatttattacggcaggcattgtagtattttataccttcctcggaggtttcctcgccgtatcttggacggactgtattcaaggggcgttgatgttcttcgccatcttggctgtacctattacggcagccatgtacttaggtggtcctattgatacgatgcaactcatccaaagtgaatttcctcaaggattaaacctctggggtgatacgagtgatatgtttgctcttgtcatcggcatcatctcttcccttggttggggtcttggctacttcggtcagccacatatcctagttcgcttcatggcgatttccgatgcgaaggaactaaaaaaatccacaaatattgctatggtttgggttatcctttccttattagcagctattttcgtaggactcatcggtcatgtatatatgttaccagaaaaattagttggtacagatgcagagacgatattcctcgttatgacggaacgtttatttacgccatttatggctggccttatctggtctgctgtacttgcagctatcatgagtactgcatccgcacaactattagtaacagcctctgctattgctaatgatttttacgctaatatcattcacaaaacggcaaccgacaaagaactcgtgcttgtaagccgtattgttgtattgttggtagcggcgatatccattttcttagcattaaatccagatagcctcatccttacgatggttgcttacgcatgggctggctttggtgcctcttttggccctgctatcatcttctccctattctggaaacgcatgacgcgccgtggttgtattgcgggtatcgtcgtaggtggtcttacagttctaatttggaaacaatttgccttctttggactttatgaaatcgtaccaggatttatcttctcatctattgcgatttaccttgtcagcattttcgataagttaccaccacgtccagtattaaaagattataaagaagcagaaaaattgcatattctctaagaacgcataaaaggagctattgatttctcaatagctcctttttcataataaagggctgttatacttacagcccttcttcttatacatattgtgataatccatcacgaatagcttcacgcacatcgaacactaatgatgctggcgataatactttcacactttgcatatattgtagtgcccaatatttgaaagcctcccgattgacatgaacacgacactctaccttttgaggcgtctcgtttaaaaatgttacatttccatcaaaccaatcgagaatttggttaacgatactgcgttttgcttcaaacactaccgttactgattcaccaccaaacatatagatatgttccttcatgtatctatctacatcaaaggtattttgattgtgatagccttggatttcccgcaagggcttacggcgaatatccaataacttaatgttgccaattcgatctacacgtagtgtagacatatcatcatggttatcgtggttacctaccaagtagtaaagccctcgactagatactaattggtagggattaaaaatataatttcgctcattacctgcataatcaagattaggatataatttattatctgtactaggctgataatagactaacgaaatttttctcccttccgtcaccgctttttcaatgagatcaatatttaggaatagatcctgacttctcacaagagaatcaggagtactcttaatttgttttccatgggatttaaaataacggcctcccaaggcagataccttatcaatcaagtctttacgctgatttacactaatatgacgtgatgctaataggccatcgattaacaaatgtaactcagcctcttcaaaggggtgaatcatataaaaattggtacgacgaatcgaaccatctgtacctagtgcagattcttcacattcaatattaaaattaccagattcatataaatcatttagatgacgccctaaggttttacgatctaccgtcaattcatatttcttcgctaagatgctacgaatttcctcttgagataatgtatgatttgcatctgtttcatctcgtaggatttctagtatatatactagtactgcctttttagatgccatggaaaaactccttttacaatatacttatactaactaacaacaaaatatggcctactatgaccatatttttacatgtacacaaaatcactcatacaaagtatatcataaaagtcatgtttacttcatgtgtttttcatgcatttcttcatccttcctatatcttttatgcaacttaacataacaaaatgtaatatttataaaataaaaagaaaatattgaacataaaaataaaggctaattctatatatcgagaattagcccttatctatcccccatcgcacattattatcatatgctacacaggaaatacctttatttaattttattttctaaatagcctaatgtttccatgcgtttcgtcaattcagcatagaacgcttcagccatagctgtttgattttttgcctgaccagcttgtgcgccgccaaagatattctttttaatcgcattaacaatagtagattttgcctttggtttattaaggatttccataaacatcaaatcttcatcggacagattttccacggcttcattttcagaggtagccccatacatgatgtctgtaccagattcaactaaagctttcacaaactttgtaaatctagcaggtacaaaggattgtccctccatatagtaagctttaggatgtggatgtttcaagaaacgtagaccaccgcgtacaatatgttctgccatagctacatataacgcatcaacagcggcttctaagcttgcatcatcgcccttagcagcatcattagcagctttcacaatggctaaagcctcgatcatattaaactgaccgccatccttaataatggactggaatgtatcgcgcacgatatcattttcaaacatggataatgcttcttcattgaagagaattgtgtaggtaaagctgttaataatggttcgcataggtacagaattcacaagttcaggatttcccatgtcgtaggttacagattctgcatgcttagccttacatataatagattttctaaaggtcgtatctagcataaaatctaaatattgctcttgagctacatggtcattaagtgcgagtttatctagtgtatccgcaatatcagcatcaaagctacgtaccatagataaagttaaatcagcatcacataggtatgccaaattatgcgcttctaaatggtcattaaattgatagaaatatacaggatcattgtttggctctaaatgatcgtgaccaacatagtattcatctttttgcataacagaacgaagagcacctaagaatttactatttcgttcctttagattgtcatattttaaaatttgactacccacgatactaccaatcgttttgccatgcagtaccttttccttgtgattaaactgagctttatcacggttgctgaacatcatcaattgacgtacttcgtccatcgtatgccaacctggataggtattataagaaatgtaggcaatgccatcctctgctaaatgttcatcgataaggcgcaacaatgcatctttaacaccgtcatcgacccaagaatacacaccatgggcgataatgtaatcaaaagtaccaatttcactaccaatagatgcaatatcagattgaactaaggaaacatttgttagtcctgcattcgcaatcacttcattgcctttttcgacttgttcttgtgaaagctcaatacctacgaatgttgcatcgggattaaataatgcttgggagataatattgccaccataggttgctcccaattctaatactcttgcagttttagggttaggtgctgaaacccctacgagagctgcataggcttcaagagtagccggtgtggtatatgggaatggcatggatttatagcctaattcactataaatggtttgttgtacgtcatttgtattcgtagtcataatatcctctatcattaaaaacatatattgtataaacaatacatgaataatacacatatatactatctattataccaaaatcatgtgtactatacacctattcataatgatgatagatgcaaaagaggcatcctcaatgaggatgcctcttgtatatgcagtttagagaaattaattatttaacttcttcgaaacctttttgtaagcgaacatagcttaagcgacgttctttagcgtcttcttcacatttagcgaataattcttctgcagcgtcaggagcagctttcgccaaggaagcataacgaacttcacctttaaggaagttttggaattcgtcgtagttgccttctttggaatccaaggagaatgggtttttaccttcagctttaagttgagggttgtatctgtaaagatcccagtaaccacaagcaactgctttgcgttgttcttcttgagctttacccataccagctttgataccatggttgatacatgggctgtaagcgatgatcaaggaaggacctggataagcttcagcttctgtaacagctttcatcaattggtttttatctgcgcccatagctacttgtgctacgtatacataaccataagacatagccatcatgccaaggtctttcttcttagtacgtttaccagatgctgcgaattgagctacagcagcttcatgagtagatttggaggattgaccaccagtgttggagtatacttcagtatcgaatacccagatgttgatgtcttcgccagaagctaatacatggtcaacaccgccgaaaccgatatcgtatgcccaaccgtcaccaccgaagatccagtgagaacgtttgattaagaattgttttttatcaaggatttctttcaattctggagttgtagcaccttcagcttcgattgctgctaccaaacgtgcagaacgttgacgagtagctgcgccaaggttagcgaattcaatccattgttccaatgcttcttttaattcgccagatgctgtttcaacagctttcttagctacttcaagcaattgttcacggattttcttaacgccgatgtacataccatagccgtattcagcattatcttcgaacaaggagtttgcccaggaaggaccttgaccttcttggttagttgtgtatggagaagctggcatggaagcaccccaaatggaggaacaaccagtagcattcgcaatcatcatacgatcgccgaacaattgagttaacaatttagcgtatggagtttcaccacaacctgcacaagcaccggagaattcgaacaatggttgttcaaattgggaacctttaacagtttccttcttcatagggttttcttttacaggaaggttaacagcgtagttccaagcttcagcttgttcgatttcggaatcgatagaagtcattactatagctttgcccttaggagctggacagatatcaacgcagttaccgcaacccaagcaatctaatggggatactgcgatacggaattgaaggtctttagcgcccaatgcagggattgtatcgaaatgttctggagctgcagccacttctgcttcagttgccaagattggacgaattgtagcatgtggacatacgaaggaacattggttacattggatacagttttctggcatccattttggaacgaacaatgcaggaccgcgtttttcgaatttagcagtaccagcaggtaatgtaccatcttcgtaaccagcgaatgtggatacaggaagatcataaccagcttgtgcattgattggttgtgcaatattttgaacgaaagatgggcaggattcacagcctggtttagctttgtgaccgccttcatcaacagcatttttccagtcagctggaacgtctacttttacaagagcaccaacgccttggtcgatagcagcgttgttcatgtcaacgatgttttgaccttttttaccataggaagtaactacggattctttcaagtatttgatagcatcatctacagggatgatttcagtcaatttgaagaatgcagcttgagttaccatgttgatacgaccgcctaagccgatttcagcagcgattttcgcagcattgatgatgtagaagttcaattctttttctgcgatttgacgacgtaatttagcaggtaaatgttcgttcaattcttcaggggaccaagtacagttcaataagaatgtaccgccttttttgataccgcgaagtaagtcgtattcatgtacgtaggattgacggtgacatgctacgaattgaggttcagtaatcaagtaaggtaagttgattggattagtaccaaaacgaaggtgagacattgttacgccaccagattttttggagtcgtaatcgaagtatgcttgtgcatacaagtcagtgtggtcaccgatgattttgatagcggatttgtttgcacctacagtaccgtcagaaccgaagccccagaatttacattcagtcaaaccaggagtttcaacttctacgccttcagcacgatctaaggacaagaatgtaacatcatcattgatacccaatgtgaagaatttcttaccattttcagcattcaagttatcgaatacagcaacgatatctgcagggataacgtctttggagctcaaaccataacgaccagcgataactttgatgttacggccaccgtcaactacagcagcttgaacgtctaagaacaatggttcagctaaagcgcctggttcttttgtacggtcaagaacagcgatgcgttctacagtttgaggaagagctttcaacaaacgatctgttgcgaatggacggaacaagtgaacgttgatgaaaccaactttgcgacccaatttatttaagtaatttacagtggattctactacttgtgcggaggaacccatagtaacgattacgtcagttgcatcaggagcacctacgtagttgaacaattggtagttagtaccagccaatttgttgatttcgttcatgtagtgttctacaacgtcaggaacgttcaagtagaatttattggatgcttcacgatgttggaagtaaacgtcagggttttctgcagtaccacgagttacaggagcatctgggttcaaagcgtttttacggaatgcttgaactgcttccatatctactaatggttttaattcttcatagtcccagatttgaattttttgaatttcatgggatgtacggaaaccgtcaaagaagttgatgaacggtacacgagttttaatagctgttaagtgagctactgcagacaagtccattacttcttgtacggaggattctgcaagcatagcgcagccagctgcacgagcagccattacgtcttggtggtcaccaaagatagctaatgcatgtgcagctaatgcacgagcagctacttggaatacgcctggaagtaattcgcctgctactttgtataagttaggaagcatcaataacaaaccttgggaagatgtgaaagttgttgttaatgcaccagcttgcaaggaaccgtgaacagcagcagcagcgcctgcttcagattgcatttctacaacttgaacagtgttaccgaagatgtttttacgaccagatgcagcccattcgtcaatgtgttctggcattggagaagatggagtgattgggtaaatcgcagcaacttctgtaaaaccataagaaacgtgagcagccgcttggttgccgtccatagttttaaatttacgactcatgtgattattgcctccttaagcatttagcaaaaatagaacacttgcttaatctatcattatgtttaggaataacaaccattacaaacttgcgtacatgaaaaaataatgcaataatatatatgttatatatatttatggcattatgtagtacaaactattttgtagtgggcacaaccataattcctaatatcataacttgatatagccctataaactcattataacgtggtgggctatatcaacgcaatacatacagtgcttggcgccttgccaatatcgctattcatgctttacttaaagtaatagctaattgcgttttagtaataattattctcatttatcaaaatcaatttttaaatttggtttgtaatatcttttatatattagggggttagttatggatttccaccatttaaaatacttcgtagaagtggctgatcaaaagagttttagtaaagcagcaagaaacttacacatctcacaatccgcgattagccgtacaattaaagccttagaagacgaacttggtgttgttctcttcatgcgtaatgctaaatccgtagaactcactgatggaggtaccatctttttaacacatgctaaacgtgttgtatttatgtttgaacatttaaaaacagattttgaaaacgagtttcgtttggagcaaggctccatccgaattggtatcccacctattaccgatgcaccaatctttgcacaacttttaggtgaatttaaaaaggtatatccacaaatcgatttagaattatatgaacaaggttctaagaaggtcgaaatcagtgtacaagaaggtttgattgatatcggtatcatctgtacgaaaccaaatcctaaggaatttgaatccttctatctcacatctgacccattatccgttatcgttcctaaaactagcccacttgcgaaggaaccagaaattcgattggatatgctttcagatgaatccttcgtacttcacaaagatgatttcaatttacatgatgaaatcattaaagcttgtaaacatacagggttccaacctcatatcgtatttgaaacaagccaacgtgacctcatgttacaaacagtaagtgcagatcttgccatcgccttattaccatctcgcctctgccctgaggttggcgagaacacagaggttgggtccaaggttgtggtacgacctctcgttccggaaattatccataccttatatgtaatctggaaaaaaggtcattacctctcccacgcttctcgcttgtggttagacttcgtaaactccaaattgccattacctggtctacaattggaggctcataaataatgaacaaaccatctgggctcgcaactaaattgcgggcccttttgaaagctaaggaaacgcccatgtgggcagttatcatagttctcatcatcgtcatcatcattcagcaggttcaaatatcggaactacaatggcgcgtcgatgaagatcacgacggttcaaccgtggacagtgtagctggacgcctatatattttagaaggcatggcgaataaacatagcgatcaaatcgaggaactacagaaatatatccgccaattacaaaatgatggtgctagatatgattgggaactaaaacaactggaatggttacatccagaactcaaggttatcgctcctgatggagatcctaatccattaaaatccacagaccttaacctagatatgaatcctggcaaggtaccggatgtaaaaaaataaagtcaataaagaaatcaggaataaataaaagcaccttatatctacacaaaagtcatcacaaatgactcttctcataggatataaggtgcttttgtcgttattcttttatagatctaattacttgttgccccatacgtctctgcaatgacgaattttttctacttgcgatacgcttctaatttatatgcatattcagttaaaagattatttgaataaattttttcattttttgaatctctaacttctttccaaataatagatgctacttttaatttattcgaataattgcaactgcattcatctgcacaaaaatccttaaaaaattgattccattgacaaaccgaattgtcatactttgcataatctgattcaccataatatactttcagcaaatctccaattgtaaagcttgtatttttttcactttttacttttctccaggcagtagccatatcagcattaaatttaaatcgtgaaacacctattaaatcagagaaatattctctaaacttcgtattaaaggaaaaattacattcaagtaatggtgtatctaaagtaatagtttccacttgcgttcttctattttttattgaagtttttttaattaaatcgcctttaaaatactgctcaataatataattgagttcttgttttgttcccctatattctaatcctaatgatttacatatttgtgaaagttcatcacgataccaataatattttttaaattcatcaaatgatgtaatttcatcaaacttaggtctacacgctttcaatattctatctccttttgatatccaaagcctgtcactactataagcttttctgctccatactgattttcatggagcaccctcgtcatgagtgagaatattagaatctacgtaataagctgatatataatagttacctaacataggcttcaattgcttctgtagtttatctatcgtcttatttattgataaaaaccatacttattgaggttataccaatccgtaatagcctgttctgattttgcgtttagcaacgttaatatttttttcgcaaattctaatgtacccgaaccattagcagtaataatatttgcgtcacaaacagcttgctcctccaaaaaattcttatcacccttgtaatgcggtgcttgtgatttcataaattcaagggtgttgccggagtgcttgatttcattcaagaaaccattttcagccataaagttgactgcattacagattgccccaactggaatatgattactaaccgcatattcaacaaggggtaatacttcattattcttttgttctgcccacgccttccccccagccaaaatcaacaggctaaaattcgcagggtagtcggctatggaataatcgggcaaaacatgaaaacctcccattgaaactttgggatttttgtcaaggctgattgtcctcacaatatagtctgtatcagaggaatttaattcagcacacacatatgcgggctcccaatctgcatatccattgaagataaatactaagatttcttttttcattttcattaccacctttcacgaattattgtacaatataaaaggtaagagctaatgtgtcaccttttataaaatctatttatattttttaatcgacatattatatcattataaagttccggcggtaagattactcgaaccttgtccaacagatacgcctattgtgaaagttgctaatacggttgctaaaataacgttctatacatattatcctctctttttttatcctgtagattctattactcttattatacataaaacagcattattactaaagaaaaagagctatacctcatacattcgctacaatgtgaacgtattaaagatatagctcttttaattttgagattcgatgcaggactacttagtcatccttgtgttccatggattttggtaaagttaatactagcaggcctgctaagaacatgcatgcgcccattacatagtaaccgtaagtaaagctaccagtgtgaccgttaataaaaccaagcatataaggtcctacccagccacccatattaccggatgagtttatgagccccattgcacctgctgcagcagcgccagataggaatgtagtcggcattgtccaccatacacccatgccgccatatacgcctacagccgttaaacagatgaataacaagctaatttcaggtgatggactatgtggtgtggcaataaaacctatggtaccaacaaataatgtggtcgccacatgccaacgtttttcatttcgtttctctgaggagtagccacagaatacttgtaccaataaagcggcactcattggaatagcaatagaccacgctacaacacttggtggccatccggataagcttttaagcacttgtggcatccagaaactgaacccccagaacccaataacccacaagaaataaattaatgctaatcgtaatacctttggatctttcaaggcttgccaaattgtgtatttctttacggattgtttttcagcttcttccttagcaagctcttctttgatatattttttctctgcatcagttacccaagcggcttcttctggtttttctttcatccagaatgcaaaaatgaaagcaaagataacagctggtaatgcttctacaataaacaacgtacgccatccatgtaatccaaaaaatgtcgtatcgagcaatacgcctgctaatggaccgccgataatgttagagaataatagagaggtaagcattaatgaaattgcctttgcccgttctctcggtaaaaaccaattaggtatcaataaagaatagataaccggatataatgacgcttcacataaccctaacaagaatcgatataagaagaactcccactccgtagtcattgtcgtcatgaggacacatacaatgccccaactaaacatgatacgtgctacccaatgcatcgcattgaatctcgatgctaacagagatgcagggacttcaaataaaacatagccaataaagaatatacctgcgcccataccgaatatttctggtgttaaccatggtaaattctctttcatggtcaagcctgcataagcgatatttacacggtctaaaaaggcaataatagaaacaataaataatggtaggatgacatgcaacatgcgccgccttgtaaaatccttgaaatcgatggccccactttgaggctctggtacagatgatgagttcatatgaatcctttctacttactatatgatacgtaccataatatattaaaaaaacaaatgtcctctgtcaatgatattatatagaatataggaataacgaattagaatatgtaacatacaaaaagcaccttatatctgttatgtaaaatctccataaagatttctaacagtatataaggtgctttcacatacactattcagatattagcgtctgttaccaaagatgcgcaacaaggataagaacaagttaatgaaatcgagatacaagctaagtgcaccagcaatttcaatacgatctaaaatcgtttcatcttcagatagtgccaattgagtaacactgtttttaatcatattcatatcaacagccgtaaagatggaaaataccacgaccccaacgtagccaagaatcaagctaattgtactataactaatggaactaagatatggaattgaaaaatacgatgctgccataaacacaagacttacgataatcataccaaagatagcagccactaagtacggtgttaatccggctaaattcttcttagtcgtaagccctacaatagaaaaggcaacgaagaacgccaacgccccaatcaatgctggtacagtagcttccatgatgccatatgctaacgaaacaagtgataaggtaacgccattcaatgcactatagatgaagaacatcgcatatagggacataacattggccttatacgtgcgcatgctaaacaagaataccaccgctacttctgcaatcaataaaatattaaaattgctagctgcaaagcgcgcccaggacggattcattagcgtcgcaacaccaatccctaatgtggtcaacaaaccaataaccatccataagatggagccctttaatcgttgcgatacaatactttctaccagtgctacatcattagcatttggcgtttgtgtcatatatggattcataagaacctccttgctatttatagtttatatacttcgttatctatctctatattatactaaaaattcttattctccgccacgaaaatatattgtatcaaactgtttttttataaattcaactgacttcaatttattctaaaagagctttcatattaattactactaacaggatcataatcagcaggtacaggagcaacgatacttacaaatacaacatcttccgtcccagtattttttgcgccatgacattcaccctttttagatactataacttgtccctttgtaaaagtcacctccgtatcaggcgttggataaaataccccgtttccttgcaatataacccatatatcatcagagtgatgatgataatgttttggtaaggtttgaccaggtttaataacccatactgaaccacctgtggaatcagtttgataaaatggcgtcttaacagctttctccaaactttcaactttcacaagttccatgtcaaaaatacgttgatcactcatactgctcacacctttcatcgattagatacaatactttctaccagtgctacatcattagcatttggcgtttgtgtcatatatggattcataagaacctccttgctatttatagtttatatacttcgttatctatctctatattatactaaaaattcttattctccgccacgaaaatatattgtatcaaactgtttttttataaattcaactgacttcaatttattctaaaagagctttcatattaattactactaacaggatcataatcagcaggtacaggagcaacgatacttacaaatacaacatcttccgtcccagtattttttgcgccatgacattcaccctttttagatactataacttgtccctttgtaaaagtcacctccgtatcaggcgttggataaaataccccgtttccttgcaatataacccatatatcatcagagtgatgatgataatgttttggtaaggtttgaccaggtttaataacccatactgaaccacctgtggaatcagtttgataaaatggcgtcttaacagctttctccaaactttcaactttcacaagttccatgtcaaaaatacgttgatcactcatactgctcacacctttcatcgattagatacaatactttctaccagtgctacatcattagcatttggcgtttgtgtcatatatggattcataagaacctccttgctatttatagtttatatacttcgttatctatctctatattatactaaaaattcttattctccgccacgaaaatatattgtatcaaactgtttttttataaattcaactgacttcaatttattctaaaagagctttcatattaattactactaacaggatcataatcagcaggtacaggagcaacgatacttacaaatacaacatcttccgtcccagtattttttgcgccatgacattcaccctttttagatactataacttgtccctttgtaaaagtcacctccgtatcaggcgttggataaaataccccgtttccttgcaatataacccatatatcatcagagtgatgatgataatgttttggtaaggtttgaccaggtttaataacccatactgaaccacctgtggaatcagtttgataaaatggcgtcttaacagctttctccaaactttcaactttcacaagttccatgtcaaaaatacgttgatcactcatactgctcacacctttcatcgattaataactagcgagtgcccgctgcatattctcccatattaatatctagaacctctcgaatcggttgaattagagaatcctcatattgtactttccactgaatatcctgattcatctcgccattttgtaaccccgcaatggtttccccatcacctattggattgtcatgttcgaaaatataattcaacacattataagcatgaaatactacatgattaggatctacaccgtgaaagtgatactgtaaatcaggtaaaaataatgtactcataccaacagaatctaccatcatatcattggtaccttgaatactaaaataacgcacatttacagcataatacataaaacgagtcacctctttatcaggatgattttcaatggtttcacgacttaaaaacttacgtgatggtccaaaaacaacggccttgcaagatggatataactccaacagcgcatctacatattttacgagcatatcagctcgttctttaggctctaaacccgaagctaacatatctgtagcaaatactctatattgacactcagctaacaattcatctacattgggacaatcccaaacttgactacgtgtaaaatcatctaatacaggtttatcgattttctcacacttcgtcaccatcaatgtcggtgagatatcggcatcattatcttcataatgaaccttataattctgaggtgccaaacctgcagattcagctccataactaaagcaatcaacagggcctaaatgctttgtaaatacctctaccattgtatcgcggctaggcatatcacactgcttcggcattaataactcaacaaaaaacaaaccgccaggacgaacagaactatctgttagatcttgtttaaatacttggctcataataacctcttaaaataaaccttacgtttaataagtaatctaatacttaaattgctataactaaacctttactaactttttaacaacaaatttaattctaacaaaattaaatcctacggatttagcactatatctaactttaagactctattacttcaccatttaactttagcctccatttatcaataaaaaccttcatcagttcattctgtctagtttcaacagttctaggattccaatgctttatcccatttacctgtgttgtaataggatatgaagtaacaccattagatgattggaaatatttttgtttcttttcctcaaaatcgtaattttgtgcttgtgagttatgttgtcttgtgagagctacaagatttgcaattttatttacccagatttttctatcagcctcactccaaaccgcaagccactgactatccattctagggttttgaggtaaaacatgttcgattgtaaaaatcttaccattaaacttaactgcaccatcactaacaaaggaatttaaacgttgtataatataatttcttctgtatgatggtaatgtatatatctctccatctaaagttttaataaactcttctttttctatttcttttaactctaaactttctatgttttgatagtgatttccttcggtctccatctcttctaatacttctttataacgattaattcgttgatttagcccttttgaggtaacaaacaaataagaagccaaacgttctaatttaataagaaaggccaagatagcgtcagaatcattttcatgctctgctaaaaattttattgctacaggcatccagtcataatttctagttttattcaaccaatataataaattattaatagattcagcatttctacttgatacatatgcttcattttttaaggcattataagcattagaatatggcacaatatacttatcaataagatcttttggatttatcttttccaaaatatttacagaaaactcttctaataaattctttttttgcttttcttttagaaaaatagttcttgtgtgtgcaaaaacctcattaaaaccatctctgcccactaaacgctcttgctcctcccagatttcagtatatttatcttgaatactatcatctaaagagcctatcgttttagatttaataatatcagatggtaataaatctaaaccacgactattcaatactgaaaaaaccctaaatgcagatgattgattgggagatgaaacaactactaaaaagcacctattcaacacaaattgacaaaatttaattaaatcatcttcattagtaaatttttcactaaatcttacttgaaacacttgacaatttttctgaatatgaacttttgcttcactatctaagatttcatcatctaactgatttaaccctcgtaaatctaactcttgtatatatttattaaaaaatgattgatctttttcgcgtaaaaatatgcgtggttgcgcattaatcatttccaactgattacccttttcttgtaagtaggctttacatagctctttatattgttctgtagagaaagtgtccgccattacagcaagaaaaatagatagagtagttaatcgttgttgaccatctataacctcagaataaggtttattatcacttttaattagtacaatactccccaaaaaataattgtcatcattatctaattcataaaaatcatataaatcatcaaataaaattgcagcctcatcttcagtccaagaataaggtctttgatacttaggaatatgatattcaaagtcagcactaaaaatttttgataatgaatactcttttgccgatattttatcactcatacaatactaccctccaccaatataaactaaattatagttctaactatagtataataaatagtcaactaaaatgtaaatttaataataaatcaatacaaaagacacgctctataagtccaaagactatagagcgggtctttatattattgtctttagactggttcgcgacgtagtcgcgaatcataaaaccacccgctatgcgggtgcggcgacgaaagttatacaaaaaaatcaccttgcttaagtataatgtaggtgttcaagccgcattatatacaaaagaaaggtgattttatatggcaacaaagacacagagccttgcgcacacaaaatggttatgcaaataccacatagtatttacacctaagtatagacgtaaagttatatataatcaatacagaaatagtttacgtgaaatactgagacgtttatgtgaatataagggcgtcaagattatagagggggagcttatggcagatcatgtgcatatgctagtgttaattccacctaaaatatcagtttcatcttttatgggatatctaaagggtaaaagtgcgctaatgatgttcgataaacacgcaaacttaaagtataaatttggaaatagacacttttggtccgagggatattatgtaagtacggtaggattaaatgaagctaccgtaaaaaaatatatacgtgagcaagagttacatgaccaaatgaaagataaacttagtgtaaaagaatatgaggacccttttaagggtagcaagtaatacatatcccctttaaggggaccgttacgagtcaatggctatgcggcttgaacgtagtgaaagccagcgcctttagacgctggcctagtactacgggcttatagcccgtgagcaaaccacccgttttacgggtggttctgattatctaatcagcatagggtgatgagccgatggcggaactgttacagcttccctcggactctcatccctactcaattatagaggtttgcgaaccacgtcgataatagagccatcgcgatattctacgattgccacgatgtcttcgtctttgtcagacacaggaatatcttgtggtttaccaactaagtcgaatgctaattgttgtaattcttcaattgtatagataggcaagttgctatctttgaagcgttcaatcaaatcagtgcgagctgggttgattgcgataccgtattcagtaacgagtacgtcaacagaggagcctggtgtaattacagttgctactttgtcacggatcattggcaatcggccacggatcaatgggcaagtaataaccgtgcatttagcacctgctgctgtatcggagtgaccgccagaagcgcccatcaatacaccattggagtctgtcattacgtttacgttgaaatcaaggtcgatttcagtggcaccaaggaatactacgtcgaggtagtttgtagtgcagtctgtccatgggttagcatacatggaagcagacatttcgatatgtgcagggtttttatccaaggatgcagctgcagtagtatcgaatgtttgagtatcatagatagctttgattaagccttcttcaagcataccagtcaagataccagtagcaccaccgatagcaaagccaccagcttcaccgcgtttacgaagtttttcagcgataaattttgctacagtcaatggagcaccaccagcgcccaattggaatacgaaaccttctttaatgataccagcttggtcaaggaattcaccagctagttcagcgattttaatttgaatagggttcttagtgaagccaattgcaccagaagcgataccttctgggtcgccgatgctttcaacaggaacaacataatctacatctgtttgagggatagcatagttatgtacataatcaactaggttatcagtgatgataacagttgtatctgcatagtgagagtcaaccttagcatagccaagtgcaccacatgcggatttacccatacgaccagttgcattgccgcgaggatcagctgtaggagcagccatgaaagctacgtcgatatgaacttcgccagattcgatagcacgagcacggccaccatgaggacgaatgactacagggcgttttaatacgccagggttttgtgttaagaatttaccaagacgatcgcgaaggccagatgtttcgagagctgtaacagtaccgtcttgaatcatttctaccaagaagtcatggcatggagataaggaagaagaagcgattgtaatatctttaatgcctttcgcttgaacgcgttccataaccattttcataacatagtcgccattgcgcaaatgatgatggaaggacaatgtcatgccatcttttacgccagctttttcgattgcttcatcgatggaagcaagaactttattagtaccaacacggctcatatgaacaggtttacctgcgcgtttagccttaggttcaattgcgaattcaccttgatatacttcgcgaccttttagtgctgggatatttgttgggatatcgcgacctactttatttaacatcgtattctgctccttcctctaattcaactttaatgcctgctgcacgtgctttatcaactacgcgttgtgcacgaactacgataggaccatcgatcatcttaccatctacggaaattacgcctttattgttgcgcaatgcatcagcataactgttcaataccttaacggaatgagcgatttctttttcatcaggagtgaatacttcgtggataattttgatttggcttgggtggatgcaagatttgccgtcataacccaatgctttaatgaattcaacttcttcgcggaaaccttgagggtcttttacgtcagagaatacagtatcgattacgcggatacctgcttcgcgtgctgcatgaaggattgtttgacgagcgaacaacaattcaacagctggtttatgtttgcctgtacgaaggtcagcacggtagtcttcagcgccaagtgcgatagctactacgcgagggccatgacagatttcacgaacattgtacaagccacgaacggattcaatagctacgatgatattgattgtaccttccggccagccattagctttttccacttcttcaattttcttcgctacgatttcaacttcggatacgtcttcagttttaggtaaacgaatcatatcaggtttagctggaacgataacatcaagatcgtcataaccataaggagtttgtgtaggatggttgatacgaacaactgtttcagcgcggaatttacgggatttcaatgcttctgcagtcaaaagacgagctgtgtctttttctgtaataggcacggaatcttcgatatcgatcatgatggaatcagagccgtggatatcagcactgttaatcatttttggtgtattaccaggaacgaacatcatggaacgggataagcgttttttagccgcttctgtaagcggattagtttttacttctggaaatgttttatcgttagccattatgctttgctccccctttctaatgcacccaacacgcgagctttaattgtgtaatcccaagcgtttttatcttgtacagttacttttacgccatcaaaaccagcctctttaactgtattcaagataacagatttaatttggtcgccatattgacgcataactttggaagtcaattcgatttcgatgccgctagcaatcggttctaccgtaactaatgcatcatttttttcgtcgaagcctgcttgcgcagctttcactaattgtgccatgttacatcctttccttataaaagatttataaaacccaaatctgtacaggctcgtcgcgagagccttgtacaaatattgaatacaactaattaaattctaacactccattgtaaaagtttcacttacatgaaaccaacaattttccaccaaggaataccgattacgaagttcaatactaaacatacaacggcagagatgagaccaacagtccaccaatcttttacattgttgtaaccagcagagaagataattggaccaggtgctgcaccatagtgagttacggatccaccatacgcatttgtaccaatcaaaacgaaagctagtaatgtaggatcgatacctgcattaacacctacaatcaagaatactggaagcattgcggagatgtaagcagtaccagatgcaaagaagtaacgaactgcaacggagataacagcaataaggaggagcatcataaatggatctaaaccaaaattcatatgcacttctaagtattttgctaaccattcaaagaatttcccttttgtcaatgcagaggataaacccaaaataccaccgaaccagattaatgtattccaagcggctttagttttgagcaaatcatcccatgttatgataccaaatacaaatgttgcaagcattgctacgacagcaacagcagtagcatcaattttaatatcaaatgttggaagaatccatcccacaattgcaagaagtgcaattacgataaggcccttttcagaacctttcataggtcctaattcagctaaaccgtcggcagcaattttcttgttatcgatttcttttacagatgggcgttcatacatataaccaataagaggaatgaacattaacatgatgagacccggaacaaacatagctaaagcccattgcccccagttcaaagatacgcctgttaattttgttacaaaatcaagagctaaatagtttggtgccatcgctgtggcgaacaagaaggatgttaccttagttgcaaaataaccattttgcaagagatatgcacctgcttttttagcagtttcacctggatgagaaccaacggcttctgcaatggacaagttgattgggtatacgatacctgctgcacgagctgtattagacggtgttgcaggggataaaatcaaatcaagaaatgcagttacataaccaagacgaagtgtagtactaccgaatgcgcgaactaaatgatacgcaatacggtgtccaagtccagttttaccaaacgcaacggataatgcaaaagctgcaaagattaaccataatgctgtattgctataaccaactaatacatcttttacattgtttaataaaatagaagatgtggcaacacctaataatactgtaataggtactggaaatggttttaataccaaacccacgattgttgctaaataaataccaaataagtgccatacttgtggtttaaggccttctggtgtgcccccgaaccacgcaattgcgacgatggcagccataacggcaacgcgccataatttgtctttcatgtgtgtctttacctttcttaactaacttaggcatacataagatcatctattccttggcaacataatcgctcgcgacatcaattacattgtttaagtttacattcattatagatgtttagtagaataatgaaaaatagattacctttataggggtcataaaaatttttataactgtcattcatactttttatgcatttttctcatagatttttaggtgtaaatgaaaaaaatgcatgcatacacctctaacaagatgtatacatgcacttacatgttatgattgatattctctaaaaatactatcgtctacgacagtgtgttttttatagtaatctcgtacgtactcgataaatgttttgacagcaattaaattggccgactcttttgtgtataccatattggtatcacgcgtaatatacgtgccatccttgctacgcaatgggctaacataaatatctttgtccttacaagatccaagccccatataggttaggatagaccatcctagaccggcccgcacaaaatgtcgacatgtactcatggaattaacatccatcgccacaataggaggttcttcaaaatgctcggcacaccatttttcaatgatattagctaccgatgcatcagtttggtatcgaataaagggcaccttctctaacgattctggtggcactaactctttatataccaagcaatacggttcttccaataacaattctgaattgcctgatacttcatatccaccacgtgcaaacgccaccatacaatcaccggtattaaacatctttacaacttgatggctgaaagctgtcttaacttgaatatgcacatctggatactgctcgcggaacgatttcaacaaagctggtaattcataatctgcaaaattgatggatgatgcaatcttcaaggtaccttgaatcttaccagtagacgatgtcaatgcatggtctaaggcctctctatcatgcagcatgcgtttgcaatagtcataatagatttcaccttgtggcgtcaatgcaatgccttctgtggtacgaagcaacaaggagtaccctacgctatcctctaaatgacgcagtcgatagctcaaagcaggctgcgaaacaaataacttttcagctgcttttgttatattaccttcatccacaacggttacaaaggtacgccattctttatcatccatagtcgtactcctttttatgactaacctatttatattatatattgcttatctagcattcgcaatgcctgcaaagaccttacctcgttcgccatcgatggtgacctctgcgccttccagcaatacgtcatgagcgtctttagctcctaagatgacaggaatgccatacgtaatgcctgcaatagcgctatctgatgtgtacccatcttcaacagaaatgataccgccagcgcgtttagcaatattcatcaattctggttccatagtccctactacaagaatatcgccggattggaagctttcataatcattcttatgattagctgcaataaatacgcgacctgtagcggatttacgcaagataccattgccagataacaacaccttgcctgcaatatgaacgcgaatcatattcgtagtacctgtagaaccagaaggtacgccagcggtaacgacaactaaatcaccagaattgatggcatttgccccaagtgcaccggtaatcgcctgttttaccatctcatcagagttgatattttcacggcccttgatggcttcaacgccccagcacaattgcatgcgacgaatcgtttcatcatgcggtgtaatggcgataattttgcaatctggacggtgacgagccacactaattgcagtatgaccagattcggtacatgtcaaaatagctgttgcccctaaatcactagcaacgcgtacgctagccaaacatacagcctcagtggttgttacatcatcgctttcttgggttctactcttatgatcataaatagcagattgctctgttacctctgcaatgcgtgtcatcgttgtaaccgcttctacagggtatgaaccattagccgtttcgccagacaacataatagcatcggtaccatctaagatggcattggccacgtcactcgcttcggcacgcgtaggacgagggttttgaatcatagattccaacatttgcgtagccgtaataacaggtttgccaaggcgattacatttttcaatcatcatcttttgcaataccggtacttcttcggccggaatttctacgcccaaatcaccacgagcaatcataagaccatctgctacatcgaggatttcatcaatattattgaccccttcagcattttcaattttggcgataatcttaatatccttttgttcagattccaagatgcgacgaatggctaccacatccttagcgcgttgcataaaggatgcggccacaaagtccacgccttgttgacagccaaaacgcaaatctaattcgtcttgctcggatacaggtggcaagctaagcgctacacctggcacggccacccgtttgcgattgccgatttcaccactgttttgaacggtggtaatgatgttattaccttcaatagcatcgatggtcaatctaacaaggccatcagctaagagaaccgtatcgccaacatgcacatcgcctactaaacctttatggtttacagtactaatgtcttgcgtgccttccacgtcatccgtagtcaatgtaaattgttgccccgcttcgaggaacaccttgccttctttaaacagtcctagacgaacctcagggccctttgtgtcgagcaataatgcgattggtttattgacaatcatcgccgcatcacgcaccatttgcatgcgctccgcttgctcttcatgcgaaccatgagagaagttaaaacgagccacattcataccagcgcgcatcatatcttctaaaataccgaacttatccgtgcccggacctacggtacatacgatttttgtacgtttcatatatcctcctaaatgggatggtatttaatatactctattgcacctctacggcaccttcacctaacaccgcttcaatgcgtgcgatgatctcatctgtaggtgcaaagcataattgaggtgataaattaattcgttttcgttgtttgtgtaaatataatgctgtcgggacttgcccttctgcttgtgaaagtatttccttcaacgcattgctattctctggcgtatcataggcacctcgaatatggatagcgatttgtcgtgcattgttgtaatttacctttaatggtgcaatgcgatcagcaataatctgcacacccttttcatccgcatcaacgcgacctcgcaccttaacgaccatatcgacagccaagaattgttgactctgagcaaataccttcgggaatgccaccacttgagccgaaccagagtaatcttcaatgcgaagaatactcatgacatcgccccgttttgtaggtctatcccctctttcagcaatgagaccgccaaaggtaatcgtttgaccatcaaaacgctctgggttttcaagaagttgccccagttcaaaaaggcctttcaattccttgttatagccttgcaatggatggcccgtaatatagaatcctgtgtagtccttttcatccttcaatttatcatcttccgataaatcaggtagattaggtactggaatcatatcgacatcatccgtgctttcaccaaagagactcatagtccccatggcagcatccttttgctgcttagcccctacagcctgtgcactttcatacatatgcaacaactgattgcggttttcctcgaatccgtccatagcaccgcagcgaattaagctttccagcaaccgtttattaacgaccttgctatctacgcgacgacaaaaatcggtaatactcgtatagagaccattggcctcacgttcagcgatgagtcgatcgatagcattgtcccctacgttcttgatgcccccaaggccaaagcgaatggcatcaccttgtacggcaaagctacgcaaggaatggtttacatcgggaccgaggacctgcacattatgttttttacaagcattgatatagtatgtgagcttatccatattttgcataaagctggtcatggtagcggccataaattctgggaagtagtgcgccttgagatacgccgtttgatacgcaatatacgcataggccgcactatgagatttattaaagccataaccggcaaagtaaacgagcaagtcaaatacttcgtttgcaatagactcttcgatgccattgttaatagaaccttgtataaaggattcacgctgtgccttgaggacggattcctttttcttacccatcgcacggcgcatcaaatccgcttggccaagggagaacccacccatggcagacgcaatttgcataacctgttcttggtagagaataacgccgaacgtatctttcaaaataggttccaaaatcggatgtaaataggtcacctcttttttaccatgacgacgatcgataaaatccgccaccataccagatcccaaagggcctgggcgatagagtgcaacgagagggattaaatcctcaaaatgctcaggcttcaaatccataacgagcttggtaatcccatcggattcgagctggaatacgccggatgtatcgcccttggtaaggagctcacaagccgctttatcatctaatggaatggtatctaaatcgaggtcaatacctcggtttgccttgatgagcttaagggcatcccccataacggtcaatgtacggaggcccaaaaagtccatctttaataggcctagttcttcgatattatccttatcatattgagtgacaaagccttcttcattagagttttgtacaggcacatggtcatctagagggtctgcggaaattacaacgcccgccgcatgggtagacgaattacgagcaatgccctctagcttttggccaaaatcaaatagctcttttacattaggatctgtatcatatagagtttttaaatctttaccctttaaggccttttctaaggtgatgcccaattcattaggaatcatcttcgcaatgcgattgacctcagctaatggtaaatcgagcacacgacctacgtcgcgaataacggcgcgagccgcttctgtaccaaaggtgatgatttgagacacgcgagcttgcccatattttcgcgttacgtaatcgatggcttcgccccgcttttcatagcagaagtcgatatcgatatcaggcatgctaacccgttctggattaaggaatcgttcaaagagcaaatcgtattgcaatgggtcaaggccggtaatacctaataaataagctactacagaaccagctgcagagccacgacctgggcctacaaggatatcgtgttcccgcgcgtaacgcacatagtcccatacgatgaggaaatagtcttcaaagcccatcgttccgataacatcgagttcgtagtcgagacgttttttaagctcatcagatgtatcgccatataagcgaggtatttctcgttcacagaccttgcgtaaataagtcttagacgtttcgccctcaggcacatcaaagtgcggcaaatggtgttcatcaaaattaaattctacattgcatcggtctgcaatctttactgtattttctaaggctccaggaatgtgtccaaagagctccgccatctcgtcccctgatttgagatagaactcatcattagggaatttcaaacgatctacttcggcgcgacgtcggcccgtttgaatacagacgcggatatcctgagcatcagcgtcgtctttcataacatagtggaaatcattggacgccacgatgcctaggccatattcgtcagctagttggcatagcacttgctgagcacgtaactcttcaggtaaaccgtgattttgaatttctaaaaagaaattatctttaccgaaggtttcaatgtaccactcaacagcgcggcgagccccctccatattatcttgcaagatatattgaggtacttccccttgaatacacgcactaagggcaataatgcccttgctgtattgacgcaacaaatcatggtcagcacggggcttataattaaaaccttccgtagaggccttcgatacaattttaacaagatttcgatagccttccatcgtttcggctagcaaaataagatgttttaatcgctcacggctacgcccttctggtttatcaaggcggctaccttctgtgacatacacttcacacccaataatcggtttaatgccttgtgccacacattctttataaaaatagatggctgcatacatattgccatggtccgtaatggcaagagctggttgttccagttccttcgcgcggcgcaccatatccggtaaacggctaatgccgtccaataaactaaattccgtatgactatgtaaatgtacaaatggcttcatggtacacctccttacggtctatgtgcaaaatagatatttaatgatttcttacgggctttccaatctggtaaaaattgggccactaaattgtgaaagttcttggaatgatccaagtatttaaaatgagcaaactcatgaaccataacgtattcaatataggcctgaggcccttctaataaacgcatattcatcttaatgagctgctttgatggcgtacaagacccccaacgactcttcatgtgctgttgctttaccgttggcatgggcacatcaatatgttgttggtgaaagcgttgatacacgaccttcgcccaatgggtaaacaccttttcccctagctggcgccaaaaggtttgcattaatttatgcttgtcttcataggtataatcagatttaacgaacatcactatgcgattagacccatcaaacttaatatgcggcttgccagatgtttctagcacctctagcgaaacaggcatgcccaaaatagatacggtttcacccgttacatattgtaatgcctctatccgttgtgccgttagtgcttctaatttaaaacgagcccgctcaataaaaggtatattttcgataacaaacgcatcaattcgatgatctggtacataagcattcgccgaaacatggacactaccatccttgtgcacacgcatgtttatgttctttacacgcttgattgttaactcatattcaattgtgtcaccattgtaggtaatagaccgagttgttgaagtattcataccttttattttatcataaaacactcataaattcgttaaaatctggagattttaataggaattattcgatatagataaaataataaaaaggagccgtagaaacagctcctcagcataacaactatcactagttgtgataaacaatttaattgttattattttatatttaatcctaaaagaacatattagaatgaaaacaagtaattataaatgcaatagttctaaccaattattatgtgctaaagctacagtatttcatccctaaaagtccgctatatcacctgtaatgtcaatttcttctttgtaatattaaaatcaccctattagaacctacttctttaaataactcgatataaactttagtatcatagtcatgtcccactatacgattcttacttatttcattccatcctatattttgttttgaaagtatccctttaatatcatcaattgtaatagaggcatatgtaatttcaagattattattttgagatgctctaccagatacataatactcttcatttactttttttgaggatatggtttctaatttttgctcatacaattgaagactttgcatttgctctggccttttaatatacgcatgtaaatacgtaattcccattaataggaataccaataagacaaatccaatataaagtttaactacaaatggaatcctattcaatttaaaataacttctagtcatactcaccaacctaagtctagtcttaatatcttctttatagcattaaaaataatttcagttaaaatataaccaatatagttattacgaaacaaaaatcttttttttgcttttttcataagcataggcttattctctcacgcaagcgcagaattgcccttagctactaaatttcttaaacataattctagacctaattcaatatacctatgccagttaaaaatgaattaaagatattcccagttgccattttcaattaacttacgatatcttataggaacattttcataaccatctattacctttattcttccaataaaatcctcatattgttttttatcaatatcaaattcaaggttcacaaatatatagtgatctaaatacccatcataaataatatatttttgatgaatttgatcaacttgaccaataaaaatctgatgattataaattgatttgtatatataataattatctgattctaaggagtttatcaatttgtatgaccttataccagaggcaatacttatcatttgtctatagtcatacaaaacgccttcattatttaactgaatcagataatcaggctttataccaactatacttcctaattcagcatgaaaaaaccaggaattcactaaaaaatagataccaattaaaaacagagaaagaatatttcctaatatactaattatcagtaatctctttttccacatctacttattaacctctacttccatttggaattctacatatgcattagttgttgcaatagcaccactttgttgccattctacaccaatggggttaaacatccccaaaatacctttataattatcacttgatctaaatttaaccttatcactaactacgctcacgcaaattattttttactaatgtattgatctcttagttgcaacaaaatatttctctcattctcttcaatttgatctatactatttagaattatcagatgttctccataaacatgttttaagattgaaacagctgaatctctagcttttttacccgcaatacattcatcaaaataaacttgcatatcattggtttctttatcaatgataataaagccactcacattaaatattaaaattttagtaggtgtatcttttacacctcgcacatcattcgtaataataagatgattatctaaatccaaaaaagtggcttcataaccagaacggtaccatcgtttattaaagtattgtgcaccatgctcagaattcattaacattttttcaaaattatctaaatcttcttttgaaaaatcagatagtttattcttcctattaacaactatcttagatttaggatgataggttttaaaaggaccactctcatcaccataaacctcgaactctaatacatctaaaatatgatttttaatatcatagcgaccaattccatcgtagcctaaatagtaatagtaagattcagttggatatactgctaaaattcgattagaaatcgattcatcaattgaggtgtctactaattcatgagactgtgtggaaacaactatattattatgggccacttgatgataatgatgatatatagctataccaaggcttacaatagctatcactataaaaatataagcttttttcatataaactctctaccaagctaaataataaaacttaacaatagcctcgttattttttgtcgaaatatctcaatcacaaccagattaaactaaaaaataccttaaactaaagtactctgtatatggtaatgtatcatctttttataaatccctataacggccaaaagatgaattaaattcctcccctcatacggaagaaattttaccaagcaaaaatcgctaataagattagtaaaatgctctgccctacagacacagcaattcgacctattcctataatactaatgccatagcttttaccttccttacacataaaatattcattgagattttgctttagtgcaaacatttctccccaaagaaggaccgcaagtattaacgaaaaaatagaaaaactatgtaaaatcctccccccgaaaatagccattaattcaatcatcaataattgacctaattgtatcatcgtaagaagaatacttttcttagtatttgcgcctgcaatagttattgtattattccgtataatatatattgcatacataccaagtaaaatactacataagatacgcccagcattcataacgactcctaactccactaatacatttctgaataactttacctatataactattcattaattattacgataaccgcatagctaatagtatagattccatttgtaaaagttagtaataatatacaatcataaattcattcatgttaataggttttacagataattttaatacttctccactagtttctttttgaaatgtattagcctctatttgctgccatccatttaaagctaaagttttttctattgtatccatattactattacttactgcatcaacaataaaataaggtctaacactaccaatttcatatttaaaaggatagatggcattgatagtaaaatgctcacgatgatcaaaacttttatattcattccaaatcagaacttgtctaccagaataactggattccaatgtattatctattttctctaatacaagagcaccagcaaatgaacctatgattattcctactacaactgtaattatttttaatttattaataacgaccctatcgaaaaccatctttatcaattcaccattttataattaattcgtataaagtcttcattcaactggactctaattctattggtattaagaccttccctaattttgtccttattattatctaaattatctaagaattcactctgattataccctaccttaaaatcagcataatcagaattcttcaccatgaacttatcgcctacacgagtccagtttatctcatcaatcaaatcctctttgtagagagaatatccatatctgattaatgcagaagagttgtcattataatgataatatcgagtagtgatgccgacaattacgattagtataaaggctgcagcaatgccactaagcagatattttaataatttgggaccaagttcctttaataaacctatatgcatatattttattagactccatcttctcattataaacagtagtaatatttacaatgctcctctaatgtacgattagtatcaaacgaactctaaaagacaattgattaaacttagactttagattcttatacatttccatgattactccatatgacgtaatacttttaaagtctagcaaaaacaaaatctttacttgttcatataatcttgttcaaaaaggtatttaaatagcttctattgccatatgcacttaatcataaacttttacaaagccatctacccattgacgttcgtttaatacaactttcccaataccaaaattgtctaacccatgaacaataaatatgtcccaagtactatatttttcttttgctaatgtagcatattcatattcactaaatacacctaaagttccacccactgtatatattgcatcaacatcatacccataccacaatataaaaacttcattggttttgataggatcatctacactataatttcttggtaccccatcatttaaaacaaattcctcaatataaaagttttcatcgcaaaattctctaaatccaggaagttctttagctaacattattgcattttctgctaaatctttagtcaaaaaatgacctaaaccaaaatactctgtatatggtaatgtatcatcttttttatatttagctacggcttcatatatagttgtattcatattatctaacctttctatatattcaatccacgaaaaacctagcctcataagtttctccattaatgtaattagagcttatttttatcgaatagtaatattttattatttagttacgaaaataaacaaaaataaccatgcatagcatcataaagaaaactggcaaaacagaataaaaatcttgttttgctttttttatcaatattgctttaatttcagacgataagttagaatcttctttaatagccggaattcttaaccacatttctagaaaacacattgttaccattcccaactgcaataaaaatttaaatattttagaatatccagaaaaaagtgtatagaagaaaattattccacccattgaaagctctgatattaataaatatctcgaccgtttaatttttattttattcaatgaaaaataaggatttttaataaaatacatacaatataagaacactaaaaatcccacaaaaacgattattatcatacaattctccactagttatattattcttaattaaattgtaaactgtatgttttacaaaaacaatatacgtaacataaataaaaaagctattatatccaaaccaatatcatatgtttggatataatagctttaatgctatcaaactttatttaattagcgacttcctaaaggaaactcaggatcaggttcgtttgtcatacaatcaaaacttatcattttttcccgcgactcaccgcaaggttagtccccaacagtccgccccgattgatatggggatggcgatgtgaggtaccttctttaatggatggtatacgagatcgttgaaatttttcaaacactgtatccagttctcgcaagagaaccttcttttgcgatgcttttaattcatacaagtcccctttgaacttaatatgtgtatccttcacagcggtgctaatgtcataaatgcgttcttgctgttcattattaacattcacgagttcatctaaggtcagctcatagtaacgagccaacgcgcacagcgtatcgaggtctggttctctatagccagtctcgtaattggacaatgccgcattactaatacctacagccttggcgacttcgatttggctctttcccatgcgtacacgagcccgttttaagttcttgtaaaattgcatgttcatcacctacatcgattacgtcaaaagaatattacagtgtttcactgataattttgaaagcttcttctgcaacagccaatgttttttcaatttcagccgatttatgacagatagatacaaagttactttcaaaagagcttggtgcatagtaaataccatggctcaagttatgatggaagaatgtcttgaaatggtccgcattgcatgcactagcgtcatcaaaattgtgaaccgatttatctgtaaagaacaaggtaaacatagaacccacgcgttgcaccaccgctggaacattgtatttcttagccaattcttcaaggccattacacaatgcttttgtgctatcttccacttgtttaaagatggttggatctcgttgcaacatagataatgtagcaagacctgccgttacagccacagggttaccactcaaagtaccggcttggtaaatagggccggatggtgctacttcgctcataattttgctagaaccgccaaatacagcaagaggcatcccaccgccaacgattttaccaaggcaagtcaaatcgggcttaatattgtatagtttttgtgcaccaccgctgctagcacggaatccacacataacttcgtcaaagattaatagggcaccatgcgcctttgttacatcgcgcaagatttcaaggaatccttctaccggaggcacacagcccatattacctgcaacaggttctacgataatacaagcaatagtatcgcctatttcatcgaataattgtttaaccgcatcgatgtcattgtatggcaatgtgatggtattttctgcaacgccctttggtacgcctgggctatctggcacgccaaatgtagcgaggccagagccggctttcaccaatagcgaatcactatgaccatggtaacagccaacaaatttaacgatacgatcgcggcccgtatacccacgagctacgcgtaatgcgctcatagtcgcctctgtaccagagttaacgagacggaccatttccatagatggcatgaaggcttgaatttttttagccaattccgtttctaacagtgtaggcgcaccatagcttgtaccacgaggaatggcctcttgcagactagctacgacctcagggttcgcatggcccaaaatcatagggccccagctcaacacatagtctatgtattcgttgttatcgatatcatagatgcggctgccactagcggagctaataaatggagggtttgagcctacgctacgataggagcgaacaggactattaacgccacctggcatatatcgctttgcttcgtcaaacgctttttctgatttacctagttgtaacatagtcactccttattgtttaagccaacgtgccacatcaagggcatggtatgtaatgataatcttagcaccagcccgtttcatggataacatcgtttccattacgaggcgttgttcatcgataagaccagcagctgccgcagttttaaccattgcatattcgccagatacattgtagacagccaatggcaattcataacgatcacgggcttcgcgaacgatatctaaatagcataatgccggtttaatcatgataatatccgtaccttcagcgatatcgagttcaatttcacgcattgcttctaagcgattagccggatccatttggtaggatttacggtccccaaattgtggagctgaattaacggcgccacggaatggaccatagtaggcagatgcatatttggcagcataactcatgatggatacattggtgaaacccgcttcatcaagagcttcgcgaatagcacctacacggccatccatcatatctgatggcgccaccatgtgggcaccagcttgcgcttggctaaccgcaaccttgcacaatagaggcaatgtttcatcatttaaaatttcgtgatgatcaatcatgccgcagtgaccagtagatgtatattggcataagcatacgtctgcaatgaccaagagatttggcaccgcttcacggatggctttaatcgcttgttgtaccggttgttccatatcccatgcggaagaaccttgttcatccttataggtaggaatgccaaagatttctacaccacgaatgccgaggtcataagcctcttgcgccacctttaccgcttcatctacagataaatggtattgtcctggcaatgtgtcgatttctttttttatgccttcaccaggaatgatgaataatggataaattaaatcagttgtatctaatgttgtttctcgtactaaatcacgcatttctggagaagtgcgcaaacggcgaggacgataggttaaatcgtacatagtaaatttccttcttccgtttaataatgacaataattagttagcacagtctttcacaattgtgtccacaagaccttcggtagtatatacagggctaatgacatccacctttaaaccagcgctcatagcagtagcagccgtaataggtccgatacacgcaatttttgtatgttctaatagtgaaagtgcatcctcacccaataaatctaacgtattggtaactgtagaggagctagtaaatgtaatatagtcaacatgaccatgttgcaatgcatctactaatacctcttgttgagatgtatcttgttgtgtttcatacaagcgcaagatatctacgtcgatatctaagtgacgcaattcacgaggaatcacttcacgagccttcttaggttgaattaatagcactgtatgtctaggtttaacatgctgtttcaatgcatcaacaacggattcagccttataatctgcagggataatatccggtgtaatgccataattcgtcaacgccttagcggtggcactgccgatagcacataccttagcataacctaaggaacgcgcatccttaccttctccgtacaatgcatcaaagaagtagcgtaccccttcagcggatgtgaatacgacacaagaatagcgatctacgccatgtaataaacgtttatcttcatcaaataattctacaggctctgttttaatagctgctgcttggataacattagcgccttgattcatgagcatatcacggaatttgctagcttgagagcgagcacgagtaaccacaatcgttttgccgaataatggcttgttatcgaaccattgcaattgttcacgcaagtttaccacatcgcctacgacgatgatggctggcgcttttagttgtgccttttccacgtcttctacaacatgttctagtgtggaaacaagcacctcttgaacaggtttagtaccccagcgaatgagcgccactggtgtattagcaggacggccatgagccatcaatttttctgcaatcgtaggtaaattgcctacgcccatgacaaagcaaagggtatccactgctgtggcaagaccttcccaatggatgccagacaccgcttttgttgggtcttcatgaccagtaacaaccgcaaaggatgtagccatagcgcgttgtgttacaggaataccagcataagcaggcgcagcgataggcgatgtaacaccaggtacaaattcaaaaggaacaccggcctcacgaagggccattgcttcttccccaccgcgaccaaatacgagtggatcaccgccctttaagcgggctacgattttgccttcttttcccttttttaccaatagttcgttgatttcccattggtgcatggtgtggtctttgcattgtttccctgcataaatcaattctgcatcaggtctagcccattctaatagatgagcatctgctaaataatcatatacaataacatctgcgcgttctatacattccttaccttttacggtgattaatttagaatctccagggcctgcgccaatcaaatatactaaacctgtcattttatgattccctccttaaccagggcttccacaatgtgtttgcccccttcttcatataaggctttcgcaaggtttttgcctaacataacccctttcttagcaggtccagacaattctccttcatatacagttttaccatccaaggacgcaatgagcgctttcaaattaagctgtcctttttcaacagttccatatacgcccatcggcacttggcagccaccattgagttgattcaagaaactacgttccccttctacggcaaggcgtgttggttcgtcgtcgatttttgaaagtatttctaacatctcagtatcgtcactgcgacattcaatagccaaagcaccttgccccacagcaggaatcatttcatccgccgtaaagacttgtgtgattctatcatctaaaccgagccgtttaagacctgcttgtgctaatacgacgccatcgaggccttctgtttcaatcttgccaagacgggtttgcacattgccgcggatgacttcgatttgtaggtctggacggcgatgcaataattgggcttgacgacgtaaactactggtgccaatacgcgctccttctggtaattggtccaatgttttatatttaggactgaccaaagcatcaaaaggaacttctcgtttggaaatagcacctaatgtaaggccatctggcaattctgtaggcatatcctttaaactatgaacggcgatatcgatatcaccagcatgcatagccgcctctaattcagcagtgaataaacctttgccacctacttcggcaaggggcttattcaaaatgcggtccccttttgtgttaaagtgaactaactctacggtaacccccgggtataaacgttgcaattcactttttacatattctgactgccataaggcaagagcactctttcgagttccaattctaatgtggttcctcatactacgagccttctttctcgagattaaacatatctttgaataaatcccaatataaaccttcttcttgtgtaccggcgatttcattaaaatgaatcatcggttctcttagcatttttctaacgatcatacgactcatagaatcaatgatgcgacgctctttatcggaaatatccggcaatttagccaacgctcgatgtaattcacggcgacgaatacggtcagccttatccgtcaataatgccatcataggacgtacggataaataactaaacttttctaacacttcatcgatggcttcgtgaataatcggttcagcccgtttcgcctcttcctcgcgttgttgtttattttcttctacaacgctttctagagcatcgatattgaataggtacacaccttcgatatccgcgacgactgggtcgatatcacgtggtaccgcaatatcaatcatcacgatgggacgtccatgacgcaatgcggcaatccgttttgcctctttttcaccaataatataatgcggtgcccccgtcgatgtaatgatgatatctgcatgttctgcttgttctacatagtgatctaatttaatggcttgcccattaaatttcttcgccaaggcttctgctttggtaaaagttcgatttgatacgaatatggtttttacgccctttgcttgaagatgtgtagctgttaactcactcatggtaccagcccctaagatgaggactgttgcttctgaaagtggtttatctaggctatcttccgccaagttaaccgccgtgtaactaacagacacaggtgtattcgcaatgcctgtattggtccgaacctttttaccaacgccaatagcgcgttggaacaagatattaaatacggttcccgtaaagcctgcactataggccgcgatataggcacctttcaattgactaaggatttgaccttcccccaatactagggagtcaaggctagcagatacgcggaataaatgttctatacatgctttctcttcatagaagaaaaatgcggattcatcaattgtatcggcatgttttaaatgctttaatacatcgagcatatacgctttaggagattgtacatcttctaatacggcataaatttccgtacgattgcaagtcgatagaatgacgcattctgaaattttttcgtattcatagagtcgatttaaggcgctttctacctcgtttttttcaaacgagaaacgttcacgcacctcaacggcagcacttctatgatttagtcctaataccactaattgcatggtgtagtttctcctctatcaaaggccattgtcccttaagaatagcctgaaattcagtttcgcttaaatgagtgcgccaaaaacggctacgctcctctacgctagggatcagtaactttacctcttccctcataattttaagtctcggtatggcaatttgcaatatattataacgattcatcatatcttgtttcacaagacgattaatacgtggtcccccattattagcactaatcgcaacatgcaaatcacccatatcgattgttgatggtactgtgaaatcacaagctgtagcattatcggcacgattgactagtatgccattattgcgtgctatagcttctatataatcattaacagctttattatctgtacagataaacaataatttacattgttttacaatgtctatatggtcatcgctaaacaatgtattgtgccaaataaatctattatcctcaagccaagctttcatctgatttgttataacagggctaatgacaatgcattgacagggctcgtctaagcataatgctagacgtcgttcagccacggcgccaccacctacaaataaaatggtatcactcgctgtagtttgtaatgttagagatatcataatgaacctcgcataattgatgataccgcttatgtatacctacatatgaaactatagatatacataagcggtataaaaaatcggcttgatgaatcaagccgattgcttatttgcttacataaatcgtttaaggtaaacgccgatacgtcccttacgggatgtgcccgtaatagcctctaccttcattcggccacgaccacgcatagagatgatatccccttctttgacctcttgggatggcccctttgcaggttgccaatttacttgcaataaaccggcatttacagcgctcaccaatttggtacgggatacgctaaagccagagcttgctaccgcatccaatcgaagtgatgcaacggtagtacgcacttctttaatcttttcttcttttggtgctatctcatctaactccatcggagttacagatacggcaaccatagcaatttttgtaaaattttgcactacaaaatctgctacagcgctatctatgagaatttgtgcgcccccttggcccatgataatatcgccaaatttcgagcgatcaatgccaagccccatcaaagaaccaagcacatcacgatgatttaacaatctaaatcgtggatcccaagataccttcaagggaacgatacccatatctactgtaccttgaaaatgactatctacaaaggcgatacgaatacgttccgccccttcatagccgccataggattgaacgagtaattcaggataagccgccttaattgcatcagcgataacaagtcctgcaggacttgtaaagtcacatacgcgatacggttttccctttaccacttgttctgctaaatcaagcatacggcgcgcttcttcaccgctaccgcttgcttcaaaatatctaattaatttactagtatcagccattatttccccaattcattggaacgagctaaacaagcaacaaccccatcttgtagggcactgcgcaagccacctttttccatagctccaatgccagcaatcgtagtgccgccagggctagtcacttggtcgcgcaatacagcaggatgtgtaccggattctaatgccattttaccagccccatacatcgtttgggcagccgccttaatcgccaattgacgaggtaatccaatgcggacccccgcatcagccaaggcatctaaaatgacaaacatatatcctgggccggcaccagacaaagcgcctaatcgatctaggtcggcttcactgacaacggctacttcaccaaccgcattaaataaagcctccacgtgaattgtatcagctccattatccgcagtcaacgcagtcataccacatccaatagatgctggagtattcggcatggcacggtacaataccgcggttggtaatgctttgcgcaaggtatctaatgttacgccagctgccacagatataaccgtagcacccgctttcacagacgttaattggctcaatacagatggtaatacctgtggtttaacagctaagataatcgtgtcaaactgcgccatatcaggtaattctacaaaacctgtaacgcccaattcgtcaactaattcgtcgcgatgttcagggcgacgcactacgattgatacatcatctctacgtaatataccttgtgaaagtgcgcctcgtaaaagggcaccacccatggcgcctacgcctatacatactgtttttcccaacatagtatcaccactttttctataccggattatttattttgccagttaaattcttgttgctcagttgttccactttcagattcattattataatcaatggatacattaacaggtacgcacatgaaaatgtctttgcctaccttttccaatttgccatctaatgcaaatgttgcaccagatacaaagtcaacgatgcgagctgcttcgtgaggatctgtattttcaaagttaatcaatacagggcgcatgtcacgcaattgatgagtgatactttcagaatcttcaaaaaccttaggttcgataacaactactttcatggctgttggacgttgtgtcatagtggatgtgcctcctaccttacgtggatggaactcagatgcagctgctgttggtgctactggtggcacgtcctctgcatagtcctcatcatcttcatattcatactcatcatcataatcataacggtcatcattattaatgccgataaaatttttgattttttgccattgttctcccatagacatggtaatcctcctaatatactcacactgttatattcccaattagttatatacgcgttccccaaagatggcagtgcctacacgcacgatgttagccccttcttgtaaggctatttcaaagtcatgtgtcatccccatcgacaaatattgtatatccccgtcagggaaataccctttcatatcttcatacaaagcatgtgccactctaaagatcggtcttgcatcctccggattttcgaaaaacggagccatgcacatcaaccctttaacgcgtacatgcggtaaggtcttcgcatagtctcgtatgtcaggaaaatcctctacggacataccagacttactcgcttcgcgagctacattgacttgtaacaatatatcttgtactttatcatgcttagcagcaaccttttcgatttcatctaatagtttcttactatctacagaatgaatcaaatcaaacatcggtaccgcttggcgaaccttattgacttgtaaatggccaattaaatgccataccaatttaggtcctgtataaagcatttgtttttcttttgcctcttgcacgcgattttcgcctacatgagtgcatccaaggcgagccacttcctctacagccgttacaggatgattctttgtaaccgctacaagtaacgccgtatccgtgcgccctacgctagccattgcatcggccatgcgttgttggattttatgaagggattcttcaatcatatgatcctcccatatagtaacgtataaataaatatcctatagacttatattatataatatttaaccaataatgtatatctttaccgtttttcaagcatgccgaataatgccatacgccccgttttaccatgttcacgacgataggaaaaacaattctcatcggtcatactatccgtaccgccaatacagatttgttcctttggaacacctcgttgcaacaaatcttcttcgataaatcgccataaatcaacatgtggtgtcgctttcgacgcaccatctctaacgatatatcggaccaattcatcactattggcatcagttattttctgccactcgtctgtgaaagtatctgccagttcttgattaacctcaaaggatttaggtccaatgctaggtcctaaatatacatagcagtcttcaaagcgcgtaccaaaatctcgttgcatcgcctctagggtgataaccggtagatggcctatagcaccgcgccaacctgcatgaacggtagccaccacatgatgcacaggatcataaatccctaccggtacgcaatcggcagtaaataagaataatggaatatttggtatatccgtatagattgcatcacaatctggaatagcggtatcagaactcatagcaccagcaccaattaaatcttctgtaatgcgtaccgcattgagtccatgcacttgattaccacaggtaatgcggtctggcgatacgcctaaatgattagccacaatgctgcggttatctaatacatcttgtaatgaatctcctatgtgagtagctaaatttagagattcacatggcttcttacatacaccgccatgacgatatgtatcccccataaccagaggaaattgattggcccagttaggcatttcaaaagaccatttacgatcatcatttgtatttacatttacaacagtaatatccatacgactgttcctctactatttatttctcgaatcacttacacacgccacagcgcttacacccttccatacaaggcggtgtatacgcttcatcaactgcccgttgccattcttgctctaaataaccatttcttagccccatatccaaatgagaccaaggcaaataatcctcgaacttgcgttcccgataattgcagtcatccatgtcgaggccggcttttttcatttcagatttaaaggatttgctacctctatctagagcacatgcagcgagtaccttgcctaaacggcggtcacctcgggcgagtacaccttggatatacgcctcttttggagattcaacgagtacctcgatgcgacgatttttttgcaatgatttcttaatatattgtaatttcttttctacactcttttgatgatccatagccatccactggaatggtgtaaatggctttggtataaatggattaatgctaagtgttaatcggcctttacagcccacctctaccatgtgagcttgtgtacgttctgctaacccgataatggcatctatatcttcatccgtttctgtgggaagtcctatcataatatatagcctcatatgctgaatgccagacttagcagataactgagccgcggtgcggagattttcttcactaatccccttgttgataacacggcgtaatcgttcactacccgtctcaggcgcaatagtaattgtcttttgtccactttcagccaagccatctactacggcttgcgtcaaagaatctgctcgcaaagatgcacaagaatagcgcatatctttagaacgaatatacgtaactaactcatctacctccggataatcggaaatagcagcccccatgagacctacctttttaccaagcttttctgcccgatctacgccttcttttaaaatatctaaaggccgtacgcgcggtacgcggaaacaataaccggccatacagaatcgacaatggcgaccacatccacgggccacttcgattatatacatagcaccaaactctgtataattcgtagctactacggtttcgccaccgctagtgagcatttcaaagtgacgtttaatcgtcttcggcgctccttctacaatatcatagcctttaaattcaccatcttcgctatagattggtacgtacaaggacggtacatacacgccagatatattcgctaattgacgcaaaatagcatgtcgatctaggccctccattttgccatcgcgaatgatatctagaacgcgactaacgataccttccccttctccgatgatgaaagcatcgataaagtccgcaaaaggctctggattaaaggtagcacatgggccaccggcaataacgatagggtcaaattctgtgcggtctttccccataataggtacgcgtccatgacgtaacatcaacggaatatgaaaatagtccatttcaaaggtcacgtcaaaggccaccacatcaaattgatgcataggcctctgtgtttcaacactcatcaacggtgtcttagtcttatcgtatgcttctaattctttcttctcaggcaagaaaatgcgttcacatacgctatcattgcgtaagttgatttcctcataaataatgtgcagaccaagattactcatgcctacaaaatatgtattgggatagacgattgctaccttttgccctgcatgagggtttacagtaacccgactatcttcgtctttatataattcttgtaatcgatcaattaaatctttacgattcactagttccctttctatataagcccactatgaatagtgggcttaaaaatactacatattagattttaaaatttagatttcaatgtatttttagtagaaatagttttagtctttaaagcacttacaatttgaggacgatgttttctttcatacggatagatgactacctcaccatctttgtattcagcaatatatacatcttttattttatacccttgcttttcaacctcttcttcaagccactcttgttctttttcaattacagctaatgtaaagtgattaatttgaccatcatcaatgaggtcaaaacgaatattatcttccccaaattgaactatattgagttgaccgttttgttctaatacagcgcgtttaacatctgttacatattgaacacctgctactcgaagctttaacttaagctccgccgcttgaatgccataacgcatacattcatctgttagaatatgccctttttcaattacgataactggatgtccatcgagaattgttttaaagaaacgaagattgccttttaagaatttaagagtcattacgagtatagtccacaaaatgaggactaacataaactgtaaaataccaatttggtcattataaatgatgccaccgataataccaccaagtacatagttttgtaattggtctaaagcagaggtcggcgctaagttgcccttccccattaagttgatttgtaaaataatcgccaagagaccaatggcgagttttgcaaaggccatcccatagacggccatagcttctgtcatatgtggtcctccttatggtaatacatccgctttatcatgaattcggtctgtaggacttactgtatacacacgagtgattgtataggtagtaaattcaggattaaattgcacctcatagtatgcatcgctaacctttaagatcataccattacgaatctttaaggagttaaccgccagttgttcacttggtatggatcgatcagtactaaaagaatgtagaaattgagccattcgagaagagtcttcagagtatgttttcattcggttatattcttgatactccagtcctaagaaaaatactacaattaaagacaaaataaccaataaatcacgatagcgattagtaaaaccatttcgcaatatctgtacacctagaacgagcaatgctaaaagaatggcaacaaaaacgataaagccccatgtttggcctgtcacagcctgactttcaacataggccaaagtgtaaaaatccatatcgttctcctttcatatattactctttattatatcacaaataaatatgataataaccaacaacgatttataaaaaatagagctaccacaatgatagctctattaaacagtttctatactaatttatttacattcacggtacacgatgatataagcatgggtattcgctgtaaaaccagattctaattctagttcaacttctaaaacggcatcgtcaacgtcacctttataatacgcattacgttgttccgcggaatagaaatacatagccgcattatattcattacccgcttgtactggaattgtgatggtaacaggctgtgtttcaacattctttgttttagtacccacattatccgtcgtgtaatatacggattcaatggtatgttctcctggtgttaatgccacaatgacttgaccatattgaccagttttatgatcaatagtagaaaggtccttaccatcaacctttacagatttaccataaatatgaagaatcgctttattagcattctcttgtacaaattgttgttcaccggcttgtcgttttttattgaacttcataaatacggcaaacaaaatggcccaaatgactgcaaccgccacgatgataataatagttgtagaactcatagtatctctccttataccaaaatatactacactgactctacgttaactatatcatacgtacttgtattactcaataaaaaagcgaccccaaatggggtcgctttcagtaagcctatgcttatcaagaaattactaatgcaatctcttatttcaaccagctcatcaagttacgaagttctgcaccaactggttcgattggatgaacagctgctgcttcgcgatgttctttaaggaatttttgaccatttttagaatcagccaagaattcatcagcgaatttaccagattgaatgtcagccaagatttgtttcatagcttctttagtttctggagtaattacgcgagggcctgcatagtaatcaccatattctgctgtgttagaaatggagttacgcattttttggaaaccaccttcgtagataaggtctacgatcaatttcatttcatgcaagcattcgaagtaagcgtttacaggttcataaccagcttctgttaatacttcgaaaccagtttgaatcaatgcagtcaaaccaccgcacaatacagcttgttcaccgaacaagtcagtttctgtttcggatttgaagttagtttccaagatacctgcacgaccaccaccgataccagaggtccaagctaatgctacttcttcagtatcgccagatgggtctttttctactgcgtacaagcaaggaacgccggagccttcttggtatgtacgacgtactaagtggccaggacctttaggtgctaccatgaatacgttgatatcttcgcgaggaacgattttaccgaagtgaatgttgaagccgtgagcgaatgctaagtatgcaccttgtttcaagttaggagcgatatcttttgcataaacgtctgcttgtaattcgtctggaatcaataccataacgatgtcagcgcctttaactgcttctgcagtttcttttacaggaagacctgcttcttcagctactgcccagcttttggaaccagcgcgaagaccgatagttacgtcaaaaccgttttctttcaagttcaatgcatgagcatgaccttgggaaccgtaacctaaaactgtaatttttttgccttccaatttacttaaattgcaatcttcatcatagtaaactgttgtacctaaaattttacctgccatgttagacaacctccaatttatattcaatagaatatttaatatatatactgtacacaatctcgcaaataattgcaaggtttgtagcgtatatcgtaatttatcgaatagtcaaatagactaattcataactaaatttgtaccctctttgtattaaaaaaatatgaattctgaaattttcataccttatttaacgataacccaagggcgatctttttcccaaacaacggatacatcaataccgaaaacatcggtcaatatatcgtctgttaagatgtcctgttttttgcctttatacacgatgagaccatctttaataattgctacatgtgtaatgctaggcataatttcttcgatttgatgagatacatagataaaaggcttcttctcatcacgagccatattttccacggttcttaagaattgctcacgagccggcaaatcaagaccagagcaaggttcatctaagatcaacaaatcaggatctgccatgatggcacgagccaatagtacacggcgttgttcgccaacggataaggtggagaatttatggccttccaaataggagattttaaattcttccattaggtctatcgctttttttcgctggtcttcagagacgtccttatagacgccgatagtgttgaaagcaccggaaataacgacattttctaccaattggcgatctaaggtagattgaaattggcccaatgtggcgcttacaaatcctaatcgatttttaatcttaacccatgcatatttgccaaattcatggccaaatacacgcaacaggccggtcgttgggatttgataggctggaatcatactgagcatcgtcgatttaccagccccattgaggcctaatagagcccagttttcgccttcttccacgtgccaatctacgccttttagaatttctcgaccatcgcgacgaaatgtgacatcttcataatgtagtacttcactactcacacaaccatctcctacattttttctccacgactcatagcggtaataccggttttagcgatttcaagaataccataggtttccataatttgtacgaaaccgcgtaatttatcgtcgctgccgatgacttctatgatcatagatgtaggggaaatatcaagtacattaccacggtatacatcggcaatttgaacaatttgagatcgcgttgtagacgttgctttcaccttgataagcattaactcacgacaaactacatcatgatcatcaaatactttcaccttaaccacatcaatcagtttgtaaatttgcttttgaatttggtcaagtgcacggtcatcagcctcaacagtaagcgtaatacgtgcatagccaggcttatttgtaacgccagaagtcattttcgtaacgttaaaaccacggcgattgaagagtgctaaaatacgagtaccaatacccgccgtatttttggcaatcactaacacttgatgttctttagccattatagcacccctttcttgcccatcatgccactcacagtaccacctgctggaatcattggcaacacattatcctcacgttcaacgcgacaatccaagacgatgctttcatcagatgtaatataggatttaaaatctttattgaacgtttcaactgaatcgaagcgcgctgctttcaaatcaaatgcatcagctagctttaagaaatcaggactcacttctaaatctacataggaataacgtcggtcattgaagatttgttgccactgacgaaccatgccaagatatccattgttgatgatgacaatcttaattggcaaattatattgacgaaccatcataagttcttcgcaggtcatttggaaaccaccatcgccaacaacaaggatgacttgtttgttaggagcacccacttgagcaccgattgccgctggtaagccatagcccatcgtaccagcaccaccagaagttacgatggtatgtggcgccttatgtgttaagaactgagcagcccacatttgatgttggcctacatcggttacgataatagcatcatccttagcaattttattgagttcagataatacatattgaggatgtaactcaccatgagtcgatttaggaacaaccataggatattcttgttgccattctcgaatttgcgaaatccaagattcatgtgtagtaggttcaacaaaagtattcaattcggttaatactcgttttaaatcgcctacgattggtacgttaatggtaacgtttttatcgatttcagctggatcgatatcgatatgaataatctttgcttttttacagaagaaatctggatgacctgtaatgcggtcatggaaacgaataccagccgcaataacgagatctgcatcttcggtacaattgttagccgctaccgttccatgcataccgaccataccaagagccaattcatggttaccagggaatccaccaaggcctaccaaggtattagctacaggaatttgagccttttcggccaatgctttaagttctgccatggcaccggattttaatacacctgcaccggcaataataagaggacgtttcgcattcttaataagggttgcagcttttttaatttgtccttggtgacctttataggttggatcataaccttcaagttgaattggcacatcgtacaatttattgtattccgccatggatattttttcggtttggatatccttaggaatatcgattaatacagggccaggacgacctgtaccagcaatgaaatacgcttctttaatgattcgtggtaagtcgtgaatatcttgcacaagatagttatgctttgtaattggcatggtaataccttgtatatccgcctcttggaatgagtccttaccaattagtgcgcgtcctacttgacccgtaatggctaccataggcacagagtccatataagcagtcataatacctgttacaagattcgtagcaccagggccagatgtggcaaggcatacgccaactttaccggatacgcgagcatatccatcagccgcatgagctgcaccttgttcatgacgcacaaaataatgtttaatttcagggaagctataaatttcatcataaattggaattaccgcgccacctggatagccgaacatatcggttacgccaaggcgatgcaatgtttcaaggacaatacgtgccccattgattgtttctgcgctcataggaaccctttcaaccagctattcagataagatttcgctggaatttaaacgtttaatggtataaccattctttttaaaagtatcaataatgctttgaatatgttcttcaccattggtttctacagtaacttgtaattctacttcgtggaagcggtcaagatttttaaactgattatgatcaagtttaataacgtttgcatccgcatctgcaagcatttgagatacagcaaccaattggcctggtttatctggaaggtttacagagaatgtaaagatacggccacgcaatacgagacctttattaatcatagaagaaatggttaatacatcgatattaccaccgctgacgatggctactgcctttttacctttgcagtctaatttttttagacccgcaagaggcaaaataccagagttttctgctactaatttatgtttttcaacgagcaacaaaaaggcttccatcaactcgtagtcagagacagtaacaatttcatctacatatttcttaatatattctaatgtagtttcgccgatttgacgtacagctgtaccatctgcgatagttgccacctcactaagtggtacaggatgatctgcttttaacgcagctattgcactagccgcaccttcaggttctacaccgattactttgatgctaggattttttaattttgcagcagctgcgataccagaaacaataccgccaccacctactggaacaagtaatacatccgcatcaggcaattcctcaagaacttccagggcaatagtaccttggccttcgatgacatcttcgtcatcaaaaggatggacgaacacatatccgtgctcttgttgtaattccatcgctttttggtaagcttcatcataaatctcgcccgataatacgacctctgcgccatattgttttgtagcattcaccttaataagaggtgtatgttttggcatgacgatagtcgccttaatgccaagacgttttgcagcaagcgctacaccttgcgcatggttgccggcagacgcggcaataacaccgcgcgccttttcttcttccgtcaatttagcaattttattgtatgctccacgcaccttaaaggaacctgttatttgtaagttttctggcttgatgtacacatcattgccacactcttcagagaacacatcgctatgaagcagtttagtttttaccgtaatcgtgctcaaccgttcacgggcttccataaaatcatataacttatgcataagacacctactcttgtagtaataacaatacttctcctattagtcttctaaaatttcgatagcaccttgtgctgcagaagatacatggagagcatattttttaaggtatccagttacattggatttgaatggtttcaatgctgctttacggcgagcgatttcatcgtcagatacagctaattccaatttgccgtttggaatatcgatgttgatgatatcaccatcttcaacaacggcgattgtaccaccagctgctgcttctggagatacgtgaccaatggatgcaccacgagtagcaccagagaaacgaccgtcagtcaacaatgctacgtctttatcaagacccataccagcgatcatggatgtcggtgtcaacatttcgcgcatgccaggaccacctttagggccttcgtaacggataactaccacatcaccttttacgattttaccgcctgtaatagcttcaacagcttcttcttcgctgttgaatacctttgctgggccagagtgaacgagcatatcatcatctacggcacctgcttttacaacggaaccgtctacagcaaggttacctttaagaacggcaataccacctgtttcatgaacaggattattccatggatggataacatcctcatccacaacatgagctgctgttgcaatttcaccttgtgttttaagagctacagttttgcaatctgtatgcaaacgaccattttctgctaaacgtttcaacacagcagatacaccacctgcagcatacaagtcttcgatgaagtatttaccagatggagaaagtttggacaattgaggtgtattttgtgcaatgcgatcgaagtcgtccaaggacaatggtacacctgcttcgtgagcgatagctggcaaatgaagtgctgtattagaggaaccacccaaagccatatctagagctactgcattttcaaaggcttcgcgtgtcataatgtctttaggacgaaggtttgctttcaatacctctactgcttgcatacctgctaatttagcaagacgtaaacgttcagaatatactgctggaattgtaccattaccaggaaggcccataccaagagcttctgttaagcagttcattgtattagctgtgtacataccagagcaagaaccacatgtaggacatgcggtattttcgatttcagctaactcagcatcatccatttcaccagtttgatgtttacctactgcttcgaatacatcagacaaaccgatttttttgccattgtgtacgcctgcaagcatagcaccaccggatacgaatacggatggaatgtttagacgagctgcagcaatcaacataccaggtactactttatcgcagtttggaatgaataccatcgcatcaaatggtgttgccatagctgttgcttcgatggaatcagcgatgatattacgagttaccaaggagtatttcataccgatgtggttcatagcaagaccatcgcaaataccgattgtattgaattcgattggtacaccacctgcgttgcggataccgtcttttacggcttgtacaatatttttcaagcccacatgaccaggaatgatttcattgaaggaattggcaataccaatgaccggtctacctaattcttcgtctacgaaaccgagtgcttttaataaagatctgtgtggtgcacgtgctacgcctgtttttaaattgtcacttctacaactcatgatattctcctcacttcttttgaaagtatccacttggacggctttcacaatgaacaaaaaaaagacgattccaaagaaccgtcttaaaagtttacaaatgatattccttttgtttacagaattccttaatacatacataaaaacctatgtaccccatggaatacatacaaataagaaacactatagtcaaatcttattgattgtatattaaaccattcgcggaacttttaagacaaaaacgtgttaagttgttgttcataattcgaatgtttttaataatcacgaccagcgcgataatcaacaagctaatgactaaaccgaacatgtttcctcctaaaataatctgtaacgataaaactataataacacgttccatagtgtcatgcaataaatattctatagatttattatattttttttatgaagttcaccatacccaatagctatacccatatatgtttatgcaccaattttggatatacaaaaatcccccgccgtagcgagggatttatatattataaaataccgaacagccacataccaaatgtaccagcccagaagtgaatcataaaacttactacagaaatagcaagacctacgcgccaccatgtgccttgaggtacatagcctgcaccaaagaagattggtgttacaccagagctataatgcgttaatgtacagccagggctattcatcaaaccaaagagcaagatggtaaatggaatcggcgcacccatggcaaccaaaatggctgcaaaggcggagaataatgcggtaatacgcgccgtaccactagcaaagaagtattgagagtatacgaaggttgcagagatgataaaagatgcccagaaccaatcgatacctacgagatgttgacttacaaaattagcaaacacagccactacaccaagtttaccaagcaggccagccataccaacgagggttcccatccaaatgaggatatcccaaccggtgcgttcacctaatatgtcttcccatgtaagggagccagttacaacacaagcaagaacgcccatcatagcaactactgtaggatgtaactttgtccaaatcgccgtagcccaaagcaaaatacacaggataaagataatagccacagaaatttcagatttcgtaattggcccaagtgcatttaattccttttgtgccatctcagccgcctctggtgtttctttgatttctggcggatagattttatagataaaccatggcatcaaaatcatacaaatcacaccagggatgacacccgcttggaaccattcccaccaagaaatatcataaccaaataattttgcacctaaggatgtgatcaataggttaccgctacaagcagttaaaaagattgttactgtaattgtattaatggtgtgggccgtcgtcatcaagtacgcccctatgcgacgtgctgtattgccatgaggctcagagtcaaaagcaagggaaatattttggacaattggaaaaatgataccgcccccacgcgccgtattagatggcgtggctggagagataatcaaatccgtacaagctaaggcataggctaatttcagagaacttgtaccaaaggcacgaattaatgtgtatgcaatgcgcttaccgaggccggaattaataatacctctagaaaagaatacggcggctacgataagccacacattagcctctgcatagccacccaaagcttgcaccatcgtaatagagctcgttgccacagcagcaacaatgccaaagagtgccatgatacccgtcggccaagggcgcaaaataaaaccaacaatcgtagccgtaaagatagccaacaaatgccaaccttcaggcttaatcgcctctgtatgaggcaaaaaccaaataatcaggccaatcaaaacggttaaggccgctcgtgtccatgtactcatagtccctccaaaaattccttaatcttaggtttttgacgcaatgtctccatttgttcatcagtcaataatttaaccttatctcggtctttattgacaaggcagaaaaatcctatatagtcgcctttgttggctctaaattgatgaattgtattacctgggatttcaataaagtccccttgtgctacatcataaatttcatcacctagcaaaagctgccccttaccgcggccaatcataaccatatgtgtatgctcatgatactctaacgtagagtagcccccgggcaaacattcaaaataacggaattggcagggaatatcataagccccatcatataacacttgtcgtgttacatccttaaaaggactaccatcttgtttatacaccaaggtatcgacgccatcccatttaaaattttccgaatcaaacttgcgtatcatctcatcacctcacaatacaaaaagggctgtatcgaaacgatgtttcaatacagctctatgaattcgattatttaaagagacgtttaatcgtacctagtaaaccatggctatgttcacgaacaccatcagccacggactctacatcaaatccagttcgttcaatagctgttgtaatcgtttcaacagatacctttgctggatcaaaagatacagtagccgttttatttggcaaatcaacttcggagctaagtacgccatctaggcctaatgtagcaccttctactgtttccttacaattattacacatcataccaggtacagtgaatacctttgttacaacgccattatcttcaccacaaccgcaatctttgcacataataatacctcctaatcattagcttccttatgtttttcatcatttttagccccagctgtcacatcgatagtggtagcagatttaacggcttcctttgtttcatcgacagctttctttgggccggaaagagcatctttaaattcattgatccccttaccaatcgctttacccacttcaggtaatttaccaggtccgaagataactagagcaatcactaaaatgactattaattcaggtgttcctatagaccccatttgtatctcctttatatttacttaatactacatcaatcagtgtacatcattatacgcatctttgtccacataccatgtcataggttcttgtgaaagcactgcacccggcagtacacgaccgatacgtttatcccatgatgtatcttcataatcctcacgttggtacaagacctttgtaagggctgtccgtttactttcaccagttacagtaaaccaaaggacatctgttttcgctaaaaatgaaaaggtcatggaaatgcgttcccacaccttaccatcctcaactgctacaacatttcgatccgccactcgcaacgcatgagaaccggcaaatagacctgctgtatggccatcttctccaagatctagaatagctaaatccaggccagattttttacaagctttaagaacattgcctatttctttctcgtactcgtcagctgcctctataacagttttcgaattggtgttaataggaaagaaatgggccgcccccttcgccttacaaagcagatatggttttacacggttgaaataattatcttcatgagactgaggcaaaaatcgctcatcagtccagacaaaaaatatccgttcccagttaacacgctcaatgtactcagcagagttcaatgtctctaacaaaccattgatgactgtgcctccagtgatacctacaatgcatgtttcggtgcggctgatttcttcattggtgaaagcaataaaatcctccgccaatgcagcgaccacatcactaggagtatcataacatttaattgtatcttgagccataaaatatggacctcctaaaactatcttaatagttctattatatacgttttgtcaatgtatgaaaaggaaaaaccgatgtaacacactatctgagctacatcggttctaatgatatgagtatgtagttctaatttacagacgatttagcacatcttattacaaaacagtcttacttttggccaaatttagggcgacggcgttctgtaaaggcaagaacaccttctttgaaatcttcagaaagacctaattcacattggttttctacttcaaatgtcttatattcttcccagcctgctaagaagcttctccacatcatttccttcataacgcggtacgattttgcagggccttttgctaatttttcaactaggcgtcttgtagcagtctctaaatcctctggttcacaaactttatatacaaaaccaagttctttacctttttcagcggaaaccgcttcaccagtcatgacaatgtgcatagcacggttcataccaatagaacgagttaacaagaacaaaccgcctgcatctggagcaaggcctacgtttacgaaggcttgaataaagcgtacattattagctgcaaccacaaaatctgcagccaacgccatattaaatgccgcacctgctgcagccccttgaaggctcatgataaccggtttaggtaagcgtttcatagccatagaaatctgcgctactagctcaacgatttcaaataaagactctgtatcaccatcatttacagcccgttccatttctgttaaatcgccaccagcagagaataccttgccttcagcattgatgagcaatgcacgaacactttcatcatgatgtgctttatctaaaacctcaaggatctccttgcacatttcgatgttaaaaccattcgccactttaggacgattaaaggtcaacgtaccaataccgttgtccactacgtactgaatagtattatatatcatatgaattctcctatatgaaaattatctttcgaaaaaattcgattatgtacctctattataggaaaataaaatggggatgtaaatgtgaaattacttcttttcactaacccctatattaaataggttttcaaattgagtaatagattctggcaaaatagctttatattccgtataaaatgcttgtaactcttgcgtggaaatacgaattacattcttcatctcttctaaattcttaatatctcgtgcatataagtaaatataataacctttatcttcatactccttgaacgaaagagcatctaattcgcctgctttcggacctttaacttgtacaacagcctttttaacattatttacatcacgagaaatcaactgacattcaatctttacagtcgttgatttattggcaatggagttagaaagtagataatagcctttaacaatttgaaggtaagaaattaccaactcttccaattcaaaatcgggtagattctctattacattattcgctatagttgaattaacattataatacgcttcatcaggttctttattagggtcttcactaagcaatttattaaatacaaatttagagtattcggtgatagctggataatgtaatctctgaacaattccacctctagcgcgattaaacgatgcttttatctgtccaggcacttctaggccaagtgcataggctttaacaggtaaaatagcaccaatatctaactctttatttaaataggccttagcatgatttttgactcgacaaatccaatacacaccatttagatctctcgtccaaaacagatcatttacacgagcctctttaaatatctttaaagctggatttaatcgtcgattttgtccatgtacatactctacaacggtatcataaaacgcagaatagtcatcagattcaaaattaacacaactccaacctatagctaaaaattgatttttacattgatttttaccatgtaagcagaaatcaattaatttctcccgttcatttgtagctgtttttaaattaatcctcgtaacgtaatccttttccatactgtttccccctaacaaatgaaatatatttacactataccataaattagacgcaaaaaacacctgcagacattgtctgcaggtgtaataacctgttgtccaaatattaacgtttggagaattggcttgctttgcgggcttttttaagaccgtattttttacgttctttcatacgtgggtcacgagtcaagaagccagcttttttcaaagattgacgaagttcgccatctacgtccaataacgcacgggagataccgtgacgaattgcaccagcttgaccggaaggaccgccaccagctacagttgcgattacatcgtattgttcaactgtgttagtcaagttcaaaggttgttttacgatcaattccaaagtttggcgaccgaaatattcattaagttcacgtttgttaacagtgattttacctgtgcccggtaccagacgaactctagcaacggaagattttctacgaccagtgccgtaatattgtgctactgccattatatgttcctccctctagattatcgtacggaaatttctaaaacttctggtttttgagctgcatgtggatgctcaggaccagcgtatacgtttaatttacggtattgttgtgcacccaatttgttttttggaagcataccacgaactgccatttcaacaacacgttcaggttgtttttcaagcatcatggacaatttagtgaaacgggaaccacctgggtaaccagagtgacggaagtattccttttgttccaattttttaccagttacgcgaattttttctgcgtttacaacgatcacatggtcaccagtgtctacgtgtggtgtgaaagttggtttatttttgccccgaagaacttttgcaacttcggcagcaaggcgtcctaaagttttaccttcagcgtcaacaacataccatttccgttcgattgtgttcggattggccataaatgtagttttcatgctgcatatcctcctaataacgtcataattctaccaaaatcagcttgtcctttgcttccggggctaatggaaacacgactaaagcttactcaaaatagtatacagattttggtggttcatgtcaatgaaaatttagtttttattaagcttatatatctagagtaatcaaacatttgtgacaaatacctatgccttttgattcataaagtactctgttataacttggtttggtgatttaaagtttaagactttttgtgcaatgttattatatctattagcatatcgactatgtgcttttagaaaactctccatactattaaacttacgagaataaaatctctcactatcaattcgatgactgcgctctacctttccattctgccacggagaaaatggtcttgtcgttttatgctctatttctaatctttttaatacaatatcaaataaacactctcgatcttttactccatagtttgtaaattcacgaccattatctgtttgtattgtatgaataggaaatcccattttggcttctaaatttaataagaaccgacttgtattagtaacacttttttcatctataatttttagaattctctttctagaaaactcatcaatagctgtaagttgatagtaagattttccttgtgttgaaaaggctaaactctcgcgaggtacgtattttatatcaatctgaaccttttctcctggatatgttactagatctggtttccacttgctttttggaacagatttaacaacctttttctctttaatgtgacaccttatttgtcggcacatagagccatatgagcgtttataaccacgcttttttgcctcaacatatacttgagacagcccttcatgtttaaacttagaatgcatacgcttgataagtgctagttcttcctcagtgtgttgattaggatgagaatgtggtttacgactatacaatcgaagtgaatcgatagtcccgtcgaaacgcttcacccaacgttgtacttgttgtctactagtatgataacggcgtgcagcttcagcattatttccatactttatagcatattcacatactcgtttacgaaatcttaattcttcagttataatagaatgcatgagaaggaactccttttgttgtaatgtttggattaagcaacttcattataacagagttccttctcattttttattcacttgtcacaaatgtattatactcttacaaatttagtttttattaagcttatatatatccacttttattcaaacattcctgttttaggattccaataagcgctctctattactatatctttttctacaccactatcactaattatagttacagtctcaagttctttcttatcaatattattagagatattaaaagtattaatgtctttattaaagttaactttttggccattaatctttacaactatatctccaacttttaacccaactttttcagcaggactatgtggttcaattttttcaatcggatagccttttttacctttttcatggctcaaagtatatccgtttgtataaccgccatcaaagtgaagtttgattttatttaaaatgattttttctgattcatcagtgctagttatttgatcatcaaacttccctttattgggattatatagttcagtgctttcaaaataagacacctccacacctacacgatttaatggtgtagaaatagaaaaataggtatcgcgatttgttttcaccgatgattcaccaaataatccaactctaagtttttttgcagacttaaacacaatcgtttcataactactacttcccatttgcaatgagctactataattaggaataagactaaccgttgaatttggatgcctcaacgctctatttgttaaaatatatgacttaacctctattggagttgcattaataattttaactgatgtagctaccgctgtagatgcagcaaataagactaataaacctgtacacaaagccccttttttaaatctcgatattaccataaccaaccctttgttaataatacatacaatacaacacaatatatacaaaaacccgcagtgcatagcactgcgggcaatagcgccaaattatttggagtacaattcgacgataagtgtttcgttaacttcgataggaagttcttcacgttgaggaagacgagtgaaagtagctttgaagccttccaagtctttttcaatgtaaggaagttcgaaagaacgaagctcttggaaattagttttgaacatttcgttgtcgcgggaagcttcacgaagttcaataacgtcacctggtttgcaggagtaggatgggatgtctacacgacgaccatttaccaaaatgtggccatggtttaccatttgacgagcttgacgaatggagttaccgaagccgatgcgatatacaaggttatcaagacgttgttccaaaaggatcaacatgttttgacctgtaacaccttgcatttttttcgctttatcataatagcgtacgaactggcgttctagcaagttgtagtaagctttaactttttgtttttctaataattgtgtgccatactcagacatttttttctgacgttggtcttttttgacgcgattcaaggcttttgcgtgaccgaatacgttcacaccaaagcgacgacaaagtttgaatcgagcctctcttctcgttgccatgtgattatcacctcataaattaatatatacttgtaccacgacataaaggtacttagtaataatatcacttcttatgcccctatgtcaattagttctacctataaatagcatgtgcaaagcagattctttcgccatactatttatcattatttttactcacctatcatagcattagaaacgaaatttcttataaaagaaccgctctatatctattccaattaattcatcgccttttatagatttagatgaaaaaatacttatagtatgctacaatacaattaatataggtaataagtagtaatgtgaggtttttattataatcggagtaccgaaatgaaagaattaccaaccatgcaagagctacaaagttttattacatataataaaacaggtagctttacactagcagcacaaacgatgaatatcacccaatctgctttcagtgcgcaaatgaaaaaattagaacgacttgtaggcgttaaattaatttctcgctccacccgcggtagtcgtttgacgccagaaggtgaactattcctgcctgaagcagaactcgtattggacacattggagagagccatacaatccatccgtttagctagcaaggttgaacgccctatcctaaatatcggcgttcttcgtagcctcggcgacattcgcctcaacggatatgtatcgcatttctttgaaaaccatcctgaattttctgtatctatttacgatatggaagaagaagagctattgctcgatttacgagaaaatcgtatcgacattgcccttctctatttaccaaataataaggacatgtccttatatgaatcaaaagcgctacgggaagatgaatttgtatattatgcgccaaaattgattgatcaagttaaagaagctacgttaaaatcaattcaacaattcccacttttaatgtatccacctaaatattttatgtaccgtacattaaaagcatatgtaggtaatggtcaacaaaatctacacatccgtggtagtcgcttatctaatccgtacacaatgattgattattgtggtaagaatgaatctggttgcatcgtagcgcgtcaaattctcgacgccctcaacatcactactggctatttaccattagaaaaaccatttaagttacaagtatgtttcgcatacaagaaaaataattctaaaactgaaacgatgcatacatttatggactatgtccatcaggaatcccctgcgagattataatactcaatccctcgttttattagcgagggattttttattgttttcaaactcaataatctactactgacagggtacaacaaccatgatacactaatatgagatttataatcattgtgaggtatatatgttattatctatattctattttttattagccggtatcgctgaaattggcggtggatatctcgtctggctctacatgcgcgatgataaaagtcctctatatctactagcaggcgccattatcttaatcttgtacggtataattcctacatttcaaccagaggccagttttggcaaggtctatgctgcatacggcggtgtatttattgccctctccatcctatggggttggctcatcgatggtttgcgaccagatatgtatgacatcatcggcggtcttgtatgcctagttggtgtttatatcatcatgtatgcaccacgataaatttcatacacaatatgatattaataactatgctgaaagcgacacatggtgtcgctttttgtatttgtactgcacacatctgaatttataacacaaaaaagcagttatccgaagataactgctttagcttggtggacgatgacaggatcgaactgccgacatcctgcttgtaaggcaggcgctctcccagctgagctaatcgtccatgtggtgacccgtccgggaatcgaacccgggataccgccgtgaaagggcggtgtcttaaccgcttgaccaacgggccatgatatgaaattggctccccgagtaggactcgaacctacgaccgatcggttaacagccgattgctctaccgactgagctatcgaggaacattagtggagcgggaaacgagattcgaactcgcgacccccgccttggcaaggcggtgctctaccgctgagctattcccgcatatggtggacgatgacaggatcgaactgccgacatcctgcttgtaaggcaggcgctctcccagctgagctaatcgtccatattggtgacccgtccgggaatcgaacccgggataccgccgtgaaagggcggtgtcttaaccgcttgaccaacgggccaaagttggtgactcacccgcgactcgaacgcgggacaccctgattaaaagtcaggtgctctgccaactgagctagtgagtcatgaatggctccccgagtaggactcgaacctacgaccgatcggttaacagccgattgctctaccaactgagctatcgaggaatgtatggagcgggaaacgagattcgaactcgcgacccccgccttggcaaggcggtgctctaccgctgagctattcccgcatacagaaccgataattactatatcataattaccttctgttagtcaagaactaaaccaggtcagttctgactgccttataataatatcaatttacacatatagtgtcaatggtttttcaatgaatttcctataaaaataatacgaaatctatatgatacaaatctacgtaatttataataaacatataaaagaggactttcaaatatatacctcctttactatttcttaagtaaaggaactatatatcatgaagtcctctctatcattatttaatatcttcttgtctacctttaccggcaccatcctcagcggcacgaacctctgcttctacgaatgttttcatgtcatttaacatatgcatagatgcatctacgatagatagccccattgtagagcctaagccttcatcgatttgtaaatcataatgtaatggaggttttacatctaaaaaacgacattgttccttatgaataggatcatcgtaaacagcggatgagaaaacatagtctttcaccaatggttccatcgtcactgctgcgagtacagcagcaccagttagtgcattatcgtataccacagccatacgatggctagcagcacctaagataaagcctgttaagaaagcaatatcaaggccacctgctacatgaagcaaacgcaatacagcagtgcggcggtcgctttcagataaaacagaccaatcatctacagcaatatcaaatggatctacaaacgaatggatgtgtgcagcacgctgtgtaatggtaggtccattatcagattctgtcaataaagtctcgtacgatgcgcctgtaatggtagcggtcgtaaccaacgcatcaagaaatgtgcgttcacctatattacctaaggccaccacttgtaggcttgcttcatgcaatttatccgcataaccaaagcccatttcaagcgcctgttccaattcatcatgactaatagaaggttctacgccaaagaagtgggacccattacgaataactcgagaatcaatattcgccaaatgatttgtatcttgttctaagccaatattaacaacgtaaaccggtgcttgtaatttaaatgccgccccttgcgtagcactcatgccttcattaaatcgttttattgcatttaaactagtatgtccatgttcaacattttgaggaccgtccacaagatggtctgctcctacaataagaacaccatattttaaatgatttggtttaggattcgccaatacgcctgcaaatcgttcagctatcgtttcgagcatagccaggctataaataggtttggttaaattatcaatgcgataccggcatgtttccatcgctatcgtatctaatggttgaatgttaaaagctctcatgccttacctcctgtgacagacttatacatatgaactgcaaggtcaagcatccccatttgaacagaaccaccagaggcttcccctaagcaaagacctaagtccacataggcttctaatccaagattttgcaatgaagatttagccgctttttctgcagataaatgagaggccataacgtagtccatggaggcaggaaccaatgttttagccaccagtgcacaagcagatgtattaaagccatcgatgatgaccataccatgatgagcagctgcccccaaaatgacacctacaatacatgtaaattcaaagccccctacggcagccaaaatgccaatggcgtcgtcctttgggatatccttatatttaactaatacatcatgaacgatgcgttgttttaatttaaggcgctcatcggaaatattcgtgcctcgcccagtggcctcttctgcagtaagaccggcaaacttagccgtcataagcgcactagctgtcgtgttggaaatccccatttcacctacaagaaacacattgtacccgtcagccatcttttcttgaatcaatttgatgcccgtttcaataccttcgattgcttgttcccgcgtcatagccggttcttctacaaaattctttgtgcccatccccaacttatgagaacgcagtccagggacccagctcatatccgcatcaatgcccatgtcgatcacttccatatgcgcaccacaataattggccaatgaattggcgccagccccttttggaattaagtaattttgcgtcataccaacagtcgtttcctttggataggcactaacccccatatcggcaacgccatgatcggcagaggcaatgatcatacaaggttttggaattgttacattcttttgatttgtagctgccccatattgagccaccatattgacgagacgtccatattgcttactatctgacgcatcattccaattcttaataatatgttgttcaatctctttactacgactgtgaatcgcgtcgcaggtttcttgtagtaaccccataacaactcctcttaattattcttaatttgtcccgtcaagtacggtaatttatttctaacatctctacttctatgtaaatagtcttctaaggcttggccttcgtcttcttgtgaaagtatttcttttacccgacgaatttcgtcttccattttagacaagccttctaatacattatgacgattcccataaatgatttcacgccacatggatggcaaaccgccggctacacgcgtacagtcacggaatccacctgcggataagcgcatacgtaattcgccgagctcatcgccaccagatacttgtgttaaaatggcggctatcagatgcggcatatggctaaccatcgctaaatacgcatcatgagcatatacatcgacaaattcgatacgggaaccaacggcacgccccatatcagccaattctttagccacctcttcattatacacatcagaagccttatcctctaatacaatccaccccatgcctttaaataggtttttatgagacacttcatagccgcccttttcagatcccgccataggatgaacagatacgaaaaaggttccctttggaatagattcatacacggcgcgtacaaaattttcttttgcactggatacatctgttaccacctgacttggtttaaacagatgagccacctctgtaaaaagtcgagcattagtatctggcggcaaggaaaacactacgatatccgaatgttcaatgagtggctctacctcggtccaagcttgggatactaccccatcttgtaatgctgcatcacatacctcttgtcggcgtgcataccctacgacatcataatctgtataggctttcaaagcctttgccaacgaaccacccaacaaacctaacccaatgatacctacggttttactcatataaacctactttcacaagtgtccctatatctccaatatagaaacgcaaacaaactataccactacacctcaataagacgtttttctttccattttccgctataccagcgatagataaacaatacacctcgtaaaatctcatcagcagccatagcaatccatatgcctacaaggccccagccccaataaataccaaataggtacgataatggcacagcacataaccacatgccaaagataccaactagcattggggtacgaatatcacctgcggcctgtaaacaaccgaccataacgatatttacagcccgccctagttcaaggaaaatctcaaccaagagcacattatgggctaaggataaaatctcaggatccgttgtaaatacagatagaaccgtatcactcgttatataaaagaacgttgccaatcctacattgatagcgatggctaaaaacatagaatgccacacgcgattcgttacttcatcttgccgtttagcgcccatcaagaatcctacgataacttgtgatgcattcgataaggctatggtatacacataacacaacatggcgatgacatatacataaaccttcgtattaatcacagttaaccctagaatattgaccatcttcataatcgtcgtttgcgataattgatagctcaatgtttcaccgccggatggcacactaatatggagcaaggatttaaccgtatgccaaggaaagggtcttaaataagacgtgctaacctgcaactgcaacagtgtcttaaacagatatacgatgataagaaggccaattacctttgaaagccatgtagaaatagatacaccgagtacaccaagactcggtatcgggccatgaccgaaaattagaatataattcgttcctacatggataatattcataacgagtgccacatacatggtaatacgcgtcaacgaatggcctctaaatacggcaactaatgcatagtacatggcctgtattggtaatcctgccgctacaatagtcgtatacaacgatgtatcccccatcgtttctggtggtatcccaagccatgtaaaaatccattcatggcaagtgatgaaaaacaccgccgccacagaggagaatacaaagtttagcactaaactaacggtacaaacctctgataactttgactgatttcgagcacccaaatattgggcaatcaaaatcgtcgtggcagtgctcataacaacgatgagcatgataaaaatatttaaaatttgattcgcattagctacagcggctaccgcctgtggcgagtaatgactcatcatcagttggtcgatattgccgacgagcatttgcaggaatacttcgataaatataggccagcttaaggtccaaatagacaagctaatgcctttttcatatgttttcatagtatcccctttatattacgcatcaaactttatcaactaaaagaaaacaccttttgctttttctttagtctcttgatctgctatgaatggaattcttgtggttctaccttctttagcagctacaatttttttgaatgggaaatcgaatatttctcgattccaagtatttaccgcatcattatataaagttctagcagctgtaatttctttttgcaaatatgaattttgttgcattgcatcgcgaattgtatcttggctttgcaattctggataattttctatagctacatttaatgctctcgtcgctttattaagctgagcatttacatcgcttctagattcttcactaaaattaccacttctatactttgcaatatccacaagaatgtctttatctacttcgatagatttttctacaagtttagccgcattagaaagaataacaacgcgttgttccatatagttatcaatttcggatgctgcattttgaattcgttgttccatcatattaaattcggaactaatttgttttaatcgccaccaaggataaacaagtacaaccacacctatagcagatatgaggtacttgtctataactatcccaaaaacgatgccaattacaccgatagccataaggatggtaggaatcagtttttcaaaaccacttgtttctacgggaatcaccttagcaataacatgtacatctcgaccttctgtcataatctctgggttcatttcatcaagttgattagccattttacttacctccattttgttcaaaaatcgtatttaataagtctactagagactgattatctttatagagtttccctgccataaaatgtccataggcaaaggaaccatttttattattttcggatcgttggtaatgattcaattctttaacacgcttgaagtcatcgtcaactgtatctacttctgctacttcaataagttcatgctttgtaaccggcacatactcattccacttaactggtacataataggttctaccattacctgctgtaacaggaacctcatccacatgctcaatagtcctatacgaataagcatctaccttaataatttccgaatctgcctcttttttatagtgactcgtttttagcaatgtttttacattacttctctgcgttgcatcaggaggaataaataacccaaggttcatcttattcgcgagcatttctgtaatgtaatcattatatttaaaatcgtaagatttcttataaatataatcagtagaagccatttgttgatatacaggaattgctaagactggcaaaaatgaaaaatacatatgctcaaaatagctacagttaaaattaatgaatttctctttaatcttttcaaaggagaaatcatagtattgtgatggtacggtatcgaaattccaatccatagagttatcagttaaaatttcattgattttacattgtttattgaaaacaaaatcatcaccatagggggaattctcaaaaatatctttgtaattactttgtgctaatggggtgaataacacgcggaactcgacctcattatttcggtctaatgcattaaattgtgcatcgaattcttcattcgccaaggcttgaaagtttccaccatcttctaaagcatcttggcttttctttctaagacttgcaatccgttttgctagctgaatctttgcgccgcccaaattaaataggcccttttctggtggtcttctatggaatattaaattcggtgctgcatgattaccatataccaaggatattctatccgcataatatggaccaggtcgttttaaagtggcacgaagtgtttcacttacatctctagtttttgtattgccatcagaatctatatattcttctgtatagacgacctcacgagtaccttcatatgtataatcatcaatccaatgcatgatacgcttaataaacacaaaaggatttcctaatatatctccggaagtaatatccaaggtagaatggtttacatcatctttttctaaaaaaccataatctttaactagctgttcataacgctccatattaaaactggaatctaaatgaataaagggaatcgcctttttgatgagttctgcggtcatctcactatgaaacaactcattcaacggttgcatcatttcgtacccttcgtcacgtatttgacttagcgttgcatctaaatcattcagtttcgcttcgaggctcttacgattaggtcgaatccaatatacatacagccctatgcataaggctataatagcgatacatataacgatggatagaatatccatttgcggttgtgaaaactgatacacaccataaataagtgcgcctatgcccacaatgaaatcgataattcgtacaataccaaaccgtttatatgtactgttagactgatttcgattctccgaaacattcgtatacttatcgattaagtctttatttttattaatatcaacctgtgattgatttaccaaatcttgaaaataatcttctgtaataccttggaatgtatccttaagagtttctctgtaatactttagtggttctagtaatgcttcattatattcattcgacacgttactctacccctctatcttatggctgtaatagttaaaatacgtctagcaggtactatacctatgtttaattataaataacttaaattaaaattagtatatcagttaagaaaaactccgtaaagtaattatcactaaccgaaaagtaatacaatgaaaatcccctctttacatagtagtcagtaaagaggggacctatatcagaacgcgatatatgttaagttaaacttacttaaattgattgcaaaggctatcaaataatgcttgatcaggtttaacaacatcttcagtcaatggacgtggatgtgtaccaccattaacagcggccatagctttttcaaaagaaggtttagtagtatcttgatagataagaccagtaaccaaaccttgtgtttcacctaatgttttaagtgcagtcgcacggtctgttggatcatatccttctggcaagctagtcaaatgttctttgaaccagtcatagctattgtgtttgttgtatgtaacacatgggctaaatacgttgatgaaggagaagccttcatggtccatagcttgttgaatcaaatcaacgagttcagcacggttaatcatataaccttgtgcaacaaatgtagcacctgcagcgatagcagtttcacaaacggacaatggtgattcaaaagccccacgaggtgttgtttttgtaacaaaaccgatatcggaacgaggggatgcttgacctttagtcaaaccgtaaacatggttatccataacgatatatgtcatgtttacattacgtttgaaagcatgaatagtatgacccataccgatagcgaacgcatcaccatcaccggaacaagcgataacttctaagtcttggttagcaagtttaacgccttgagcgtatggaagcgcacgaccatgagttgtatgtgcaccatatgcatagaaataaccaccaatacggctagaacaaccgataccagagataactgccaatttttcaggtggaatattttttgctactactgcatcagtaatggcagcttgtaccccataatgaccacaaccaggacaccagttagggcgaatatcatttctgtaatctttagctgttgtcatattataggacctccttaattgcatttttcacatatgattttgtgaatggattaccatcatatttcaagcagctagaaattttggatttcttatgcatgttgattttgaataggttagtcaattgacctgttgcattatgttctacaataacaacttttttagctgaatccatgaatggttgcaattgttttgcagggaatggtttaatcaaacgaagttgtaaatggttaactttaacgccttcttgatcgaattcagcaactgcttcttcgatagcaccacggctagaagccatacctacaacgagtacatcagcttcatcgtattttgcattgttcaagaatggttcatagttatcagctacagtttccaatttgcggaaacgtttatccgtttgcgctacgtgcattgtaggcgcttctgctggtttaccttcttcattatgttctagacctgtagaaaggaatagaccatttttcatgccaggaatcgtacgaggagaaatgccatcttctgtcaattcaaagcgtttgaagtatttaggttgttccaattcaggaaggtcagcttccttcatcattttaccgcgattaataggtacacggttcaagtcgaatgtaggaatggattgtttattcaaaccttgttgtaagtccggcataaagataactgggcattgatacatttctgccaagttgaaagctttttgaatttcatagaaacattcttcgatggatgttggagaaataacgatacctgcataatcgccatgagcgttgtagcaagccgcatcaatatcggattgttctacctttgtagccatacctgtggatgggccggaacgttgtacgtcgataacaaccataggaagttctgccatggatgccatagacaaggattctgccatcaaggatagaccaggaccagaagtacaagtgaaaccacgaacacctgcgtatacaccgcccatagctgtcatacaagctgcgatttcatcttctgtttgaacgatagtagcacctaatttatccatgtttttaatcatgtattccattacttcagatgctggagtaataggataggatgccatgaaacgggaacctgctgcaatagcaccaagagcacatgcttcattacctaataagaacatttgatctttcttaccaggagctggtaatgtatcgatttctacatcacctaatttttccattacaaggctatgaccatcatcaaaagctgccaagtttttatccacgatttcttgggattttttcgcaaattttgcagcgattgcatctttaaacatcttagtgtcgaaaccaagaagcgctacggacataccaagtgctacgatattacgcatcaacaaggaaccttgtttcattgccgtttcagagattggcaaggataagcagttaactttggaaccttcaaatttagaaaaatctggttttactttactatcgcagatgatataaccaccatcacgcacttcaacaccatgcatatcaacagtttcttggtcaagagccaacaagaagtctacgccttcaccaatggacataacttgttccaatgcaacgcgcaatgcgaaggtagtatgaccacctttgatacgggatgcaaacaaacgttgactgtatagagaatatccttcttttgcaaggattgtagccatgatttcgccacagctctcgataccttcaccttgttgtccacccattttccagataaaatctttacgtttttgcaagagattcaccctccttaggatataattacaatgctgacaagagtctaccctatgtatattaattacagctaagtaataaacctgtcttatagtgcaattgtaacatgtatagtagacgttttacaatgtaacatttcataattattcttctttaatacgttctattactgcatgtagtctatcagtagtaaagaaaatttcctctaatactagaccttgagccggtgctgtttttccaattcgcttacggtcctttgcggccaatagttcaggaatttgagccactgactttctaccaagccccacatccaccaataggcctgctatatttcgaaccatatgatataaaaatccatcgcccacaacagaaatatcaatacggcctgccttctctttgataccgatggcataaatagtttttacaggatctacgggtgtcgtttttgcccctttcaatgtagaaaagtcatgcgttccttcaagagctttgcctgctcgatgcatagcttcaacatctagaggtttctttacatgccaatgataccgctgccccatagggtccgcaatttcacgattataaatggagtaaatatactccttaccaaaaatgttatgacgaggtttccagtctaatggtatctcaatagcctccgttacaacgatatcctttggcaaatgggcaatcgtcgcccgtggaatattctctaccggtatggatcccgatgtttgaaatgcacagacttgaaagcgtgcatgtacacccgcatcggtacgcgatgcaccataaatttggattggttcagcacaaataatagataatgccttttccaaagccccctgaacagtaatccccttatcagcaggttgtttctgataacccgctaaatcagtaccatcataggccacaattaaccgtatattccgcattatcctaaccaccataggattaataagatagccgttacaataaacacggctcccaagcctacataatcaacccatgtaatgctgagttctttcatacgcgtacgattaacaccgccgcgataacaacgtgcttccatagcgatagccaattcatcagcacggcggaatgcactaataaataatggcactaagagaggtaccatatttttagctcgctgaataatcgaacctgttacaaaatcagcaccacgagccgattgggctttcataatacgatccgtttcatcaagcaaggtaggaataaaacgcaatgcaatggtcatcatcatagctagttcatgagccggtacaccgatgcggcggaatgggtttagtaaatgttcaatgccatctgtcagccgtataggtgatgtcgtataggttagcaatgacgagaataagattaggaatactaatcgtgccgccatttgcaagcccatagccagtccattatccgtaatattaatgatgccataggagatgatgctattaccaggagttgtaaaaatatgaatccccattgtgaatacaatgataatccataatggttttatcgcattccacatcaaacgtaatggcagacgagataataacatagctccaatagtgaaagccgccacaatgccatatgccaatggtgtgttcgccaagaatatggcaacaacgaaaatagtagtgcctataatttttgcccgtgggtccatgcgatgtaataacgagttaccagggaagaattggccaattgtaatattatttaacatgttgacctccttctagaatagcttgtacagcatcatctacggttaatacttcgtttgatacatcaaggcctcggttccgcaatgattcaatcaatacggacacaggtggcacatctacgccaacctgttgtaatacatggcgatgatgattaaagatatctaacggtttaccatccaatacaatctgacccttatctaatacaatgagacgattcgccatgcgtgaaatatcttccatattatgagatacgaggatgactgttacatccttttccttatgtagtttaataatttcatcaaagatttcttcacgcccaaatggatcaaggcctgcagaaggttcatcgagtacaaggaaatccggttccatcgccactacaccagctatggcaacacggcgcatttgaccgccagataaatgaaacggagaacgttcagcataggtatcataatccagacctacaaaggccatagcttcacgcactcgacggtctacctcttctttatcaagacctaagttttttggcccaaatgcaatatcttcggcaatcgtttcctcgaaaagttgatgttcaggatattggaataccatgcctaccttatgacgcatgtgttttgcttcatcagttttttcacttacgtccacaccattgaccgtcactttaccagtcgtaggatgcaataaaccattgagatgttgcacaaatgtagatttacccgatccagtatgtccaataatgccgagaaactcaccgttttcaatggttacggagatgcccttcaacgcagttttctcaaaaggagtgcccacaccataggtataggtaatattatctaatacaatagccatcagtgtgcctccttcgcatagtacgtcgttaatgcatcaccaagttcatcattagtaatgatatcattagggatatctacgcccttttgaatgagtttcgatgcaacctcagctgcaacaggtacatctaagcccaaatcttttaacgtatccacttgagtaaagatttcacgcggtgtgccctcttgtaatttaacgccatttttcataaccacaacacggtctgcggttaccgcttcctccataaaatgggtaatgattacaatggtaataccttcttctttattgagtctatgaattgtttcaagaacctctaaacgcccttttggatccaacatagcagtaggttcatctaatacgatacaatctggtttcatagcaagtacaccagcaatggcaatccgttgcttttgacctccagatagtaaatgtggaccatgttccgcatattcagtcatgtttactgcagccaaagcatcatcaacacgtttacgaatttcagcactaggtacgcccaaattctctggaccaaatgctacatcctcttctaccacagctgctacgatttgattatctggattttggaataccatgcccacatgttggcgaatattccaaatatgttcatcatctaatgtgtcaaaaccacatacggtaacatttcccgctgtaggttgcaataacacattaaaatgcttagccaatgtacttttaccactgccgttagtacctataatggccacaaattcgccgcgccgtatggtaagactcacatcatctagggcacgcacgtcattaccattttcatcaacatataaatggcttaaatgattgacctcaatcattgtttcgtttgatttcatgaatagcctcgtatctttctagtcaatttcgttttatgtgaaagttaacaattaatcttccatcactgcgataactgctactatataacgatatttgtactagtcgattgtaccataaaattgacaataaaaaaacggtgttgcaaccgaagttacaacaccgtatgagtttgattaaactaactcgataatagcgcaaggtgcagcgtcacctttgcgaagaccagttttgattacacgagtgtaaccaccttgacggtctgcatattttggagcaattgtatcaaacaatttttttactacgctttcatccatgaggtatgcaagaacttggcgacgtgcatgaagatcaccacgtttagccaaagttaccatttgatcagctaaagagcgaagttctttcgctttagcttcagtagtttcgatacgctcatattggaagaaagatgttaacatgctacggaacaacgctttacgagcggagctatcgcggcctaattttctgtacattcgtcttcctccttattcgcctttttgcttaagattaaatccacctgggtggttgctgagtttttcagcgatttcgtcgatagattttttacctaagttgcgaacttttcctaagtcatcaatggttttgtctagcaaatctgcaattgtattgataccagcacgtttcaagcagttgtacgcacgaacagagagttccaattcatcaatggaaatcttagctgggccgtcatcttcttgaacatcttgaggagtagggtcaactacatcaccttcaagattttgatcgtctaattcaacaacacttgtagagtgcgctaatttagtgaagttccctaaataaccaatcataatggcagcagattttgccactgcatcagcagcggtaatggaaccatcagtccaaacttctaatgtaagtttgtcgaagtccatttcattacctacgcgaacatcactcacttcgtatttagcacgaagaattggggagaagatggaatcgattggaatacaaccgataacatctgtatcctttttattcttagtagaaggaacatagcccttaccacgttcgattactacgtccattactaaatgagctgtttcatccattgtcgcaatcacgagctctggattcaatacttctacttctggtggaaattgttcagccaaatcagcagctgttaatacaccatccttttggaaatcaaagtgaacttccaatggccattctgcatcttcttcaagcttaatgcacaattgctttaagttaaggatgatatccgtaacatcttcgcggataccaggaatagtagagaattcatgaagaaccccatcaattttgatagaggtgatagctgccccatccaaggatgaaagcaaaattctgcgcaagctattaccgagagtgataccatagccacgatctaatggttcgcatacgaatttaccatagcgaccgccttcggcgatgtccactttctcgattttaagtttcttttcttcgctcatcaggaacatcctcctatataacacacgttcttagtttaattatagcacggccgtcaaaacggccgtctatatattatacacgacggcgttttggagggcgacaaccattgtgaggaattggagttacgtctttaatggaagtaacttcaagacctgcagcttgtaaagcacggattgcagcttcacggccggatccaggaccttttacaaatacttcaacagtgcgaagaccatgttccattgcagctttagcagcttgttcagcagccatttgagcagcgaatggagtggatttacgggaaccacggaagcccaagccaccagcggaagcccaagacaacgcattaccgtttgtatctgtcaaagttacgatagtgttattgaatgtagaacgaatatgagccgcaccggattcaatatgtttcttttcttttctttttgttctaacaacttttttagccacgctttatccctcctttatcttatttctttttaccagcaattgcttttctaggacctttgcgagtacgtgcattcgttttagtacgttgaccacgaagtggtaaacccatacgatgacgtttgcctcgataggagttgatttcaatcaagcgtttaatgttaagtgcttcttcacgacgaaggtcaccttctactttataatcagcatctaacacttcacgaattttcgctacttcatcttcagaaagatcgcgaacacgtgtgtcaggattgataccagttttagctagaatttcgtctgctaaagtaggaccaataccataaatataagttaaaccaatttccactcgtttatcacgaggtaaatctacaccggcgatacgtgccatttaaatctccacctcctatcagattatccttgtttttgtttatgttttggattttcgcaaataaccattacgcggcctttgcgtttaatgattttacatttttcgcatatctttttaactgatggttgaaccttcattagtacctcctttgtggaccctatgcttatttaaagcgataggtgatgcgaccacgatttaagtcatatggtgtcagttccatagtaactttatcaccaggaagaatacggataaaattcatacgcattttacctgacacgtgagctaataccacatgaccattttccaattctacttggaacatagcattaggtaatgcttctactaccgtaccttccacctcaataacgtcttcttttgacatattttttcctccggttacctgtttatttaattaaccgcggttcattacgcatggttaatatttcagggccgttttctgtaacaaccactgtatgttcgaaatgagcagctggtttaccatcaatggtaactgccgtccagtcatcacccaacacacgaactttataagaacctaatgtaatcattggttcaatacacaataccatacctggtttcatcacaggaccgtggtccggattaccatagtttggaatttgtggatcttcatgcatttcacggcctaaaccatgaccaacgaagtcgcgaacgacaccgtaaccatgtttctcacaatacgtttgaacagcgtgaccgatagcaccgatatggttgccaactttcacttgttcgattcccttgaacagactttcctctgttacttttaacaatttcatcacatctggtttgacatgaccaattggaattgtcacagccgaatcgccatgatagccatcgattgatgcaacaagatcaatactgatgacatcaccgtttttaagcttacgcttagcgctcggaataccatgaacaacttcttcattgatagaagcacagattgtagcagggaacccatagtaccctttacaacttggtataccaccgtggctgcgaatatattcttcggcaattgtatctaactcaagcgtcgtgatgccaggtttagccttttctactaacaaggacaacgtgtctgctgtaagcttgcttgccttgcggatacattcaatttcatgggcagatttcaaaataatcatggattatttctccaacgccttaatgatgtcagcaaatactgcgtctacatcttgtaaaccattgatttcttgatacaaaccgctattgcgatagtagtcgattaatggtttagtagattcttcgtacacagctagacgtttctgtactgtttcagggttatcatcagcacgattttcaagaactgctcgttcgctaatgcgtttaacaagttcttcggaaggaacatttaagttaagcacagcgtccaaagaaattcctaattcttttaagattgcatccaaggatacagcttgtgctgtagttcttgggaatccatcaagaataaatccagatttgcagtcatctttaaccaagcgatcacgtacgataccaacagttacactgtctggtaccaattgaccagcatcgatatatttcttagcctcaactccaagaggtgtttcgttcttaatcgcagcgcggaacatatcacctgttgaaatttggggaataccgtatttttcaataagtcgagctgcctgtgtgcctttaccagcaccaggaggtcccattaataaaatatacattctgtttccctcctattttacaaagcccttatagtggcgtgttaccataagtgactcaatttgttgcattgtatcaagtgctacacctacaacgatcaagagagctgtaccaccaaagtatacgccttgcacgcctgtaatcgtaccgaggaaattcggtatgatagcgacgatagctaagaatacagcaccagccaatgtaatcttggtcatcacgttatccacataatcagcagtaggtttacccgcacgaataccagggataaaaccaccgtattttttcatattatctgccatatctgtaatgttgatagagattgcagtatagaaatacgtaaagataaaaatcaatattgcatacaatgccgtttgtaacggcgtcccccatgtaaatagatcagcaattttatgaacgaaatcgttttcgataaattgcgcaatcgttacagggaacatcaacacagatgacgcaaagataattggaattacacctgcctgattgactttcaacggcaagaatgtagagtgaccaccgtacattttacgaccaactacgcgtttagcatattgaatcggaatacgacgttggccttgcgtaacagctactacaacagcaatcattgcaatagcgattacagcaaataagaatgcttggaacatattgattgttccagtttgtatatattggtaaatggtttgaagaccatctggtaaacgagctacgataccagcaaagataatcaaggaaataccattaccaatgccatatgctgtgatttgttcgccaatccacatcaataagcatgtgcctgctgttaggatgatagctacaacaaatacactaaggatatcattatttacgagagcggaatttgcacgtagtgcaaacgccatgccaaaggcttgaacaaaacctaaaacaaccgtaccataacgagtcaccttcgcaatttttttacggccctcttcaccatctttactccacgcttcaaactgtggaactacagcttgaagtagttgcatgatgatggaagcattaatgtaaggtgtaatactcattgcaaagatagagaacttacttagcgcaccaccagcaaacaagtctaatagaccgaataggttaccggatgtaaacaaggattcgattacagatgcatctacacctggtacagggatgtgaatgccggctctaaacacggcaaacatcatcaatgtgtacaaaatcttattacgcaactcggtaatcttaaagatgttcgagaggctatctagcaaactagatcacctctacttttccgcctgctgctgtgattttttcttcagcagatttagtgaagccgttagcgataacagtaaggtttttagtttccaaagaaccattacctaagatgcggatgccatcgcgtacgtttttcaaaatgccagcttcaataagagctactggatcaactgttgcaccgtcttcaaaacggttcaattgttctacgttaacttcagcatattgtttagcaaaaacgttgttgaaaccacgttttggtaaacgacgataaagaggcatttggccgccttcaaaaccggagcgaacgccaccgccagaacgggagttttgacctttttgaccacgaccagatgttttacccaagccagaacctaaaccacggcctacacgagtacgagtttttttggaaccagctgctggttgtaattcatgaagtttcattcagtgcacctccttatcagtattaaacttcttcaacttttactaaatgtctaactttgtgaagcataccttgaatttgaggtgttacttcttttacgacttgagaattagtttttttcaagcccaaagctttaactgtcgcgcgttgatcttcaggacgaccgattaagcttcttgttaatgttactttaacttgtgccatttcttgtctccttattacgcgttatagatttcttcaacggatttaccgcgaagttcagcaacttcgctagcacgtttcaaatctttcaaaccttcaattgtagcacgaaccatattgttagggttagaagagcccaaagatttagttaagatgttacgaacaccaaccaattccaatacggcacgaacagggccaccagcgataacgccagtaccttcagcagctggtttcaagaatacgcggcctgcgccgaatacacctgttacgctgtgagggattgtaccatttttaactgctacgtttacgatatttttcttagcatcatcgatacctttgcggatagcttcaggtacttccgcagctttacctaagccaacgcctacataaccgttgccatcaccaacaactacaagtgcgctgaaggaaaaacgacgaccgcctttaactactttggctacgcggttgatgaatactactctttctttaagatcaagactggtgtagtcaattctcgccatgtctatagttcctccttcttagaattttaagcctgcttcacgagcaccttctgcaagtgctgctacgcgaccatgataaatgtaaccaccacggtcaaacactacagtgtcaatacctttagcgatagcttttttagcaactgcttcaccaacagctttagcagcagcaatgttaccaccataggataagtttaaatctttatctaaagagctagcagctactaatgttgtacctgctacgtcatcgataacttgagcgtaaatgttgctcaagctgcgatatacgttcaaacgtggacaagttgccgtaccagaaatatggcggcgaatacgaagatgacgttttgctcgagcgatgtttctactagatttacgaggcaagatattcactcctttcattcatatagatgatattactatttaccttttgcaccagctttaccagctttacgacgaacaacttcgccttcatagcggatacctttacctttgtaaggttcaggttttctccatttacggatatcagctgctactgcacctacaacttctttgtctgcaccagacacaacgattttgttaggagctggaacttcaattgtaataccagctggagcttccatctctaccggatgagagaagccaagtgtaagagccaatttattgccttgtttagccgctctgtaaccaacaccgttgatttcaagagtttttgtaaatccttctgctacgcctgttaccatattagcaacaagagcgcgagtcaaaccgtgaagggcacgatgagctttatcttcggaaggacgagctactgtgattgtgttaccttctacagtgatgatcatatctggatgcaaatcgcgagataattcacctttaggaccttttacgttcatatgatggttatcatatgtaacagtaacgcctgcaggaatctcgataggcattctaccgatacgtgacattatttctacctcctattgctactattaccaaacgtatgcgattacttcgccaccaagaccttctttacgagcttgtttgtcgctcataacgcctttggatgtagaaataactgcgatacccaaaccaccaagtacacgaggaagttcttcctttttcgcgtaaacacgtaaacctggtttggaaatacgtttaattcctgtaataactttttcgttattggaaccatatttcaaagttacttttaaagtgttttcttctttttcaacgttctttacgaaaccttcttgtaaaaggatttcaagaactgctgctttcattctagatgcaggaatgtttaccgtttcgtgaagtgcagcatttgcattacggatgcgcgtaagcatatccgcgataggatcggtcattaccataatctaaaaacctcctctcgtctaatattaccagctggcttttttaacaccaggaatttgtcctttgtacgccaattcacggaacgcaatacggctgataccgaatttacgcatatagccgtgaggacgaccagttaagttgcaacgattgtgcaaacgtgttggggatgcattagctggtaatttggacaagccttcataatcacctgctgctttaagcgccgcacgtttagctgcatatttttcaacgattttagcgcgtttcttttcgcgttcaatcatagattttttagccatctatatgttcctcctattatttttcaaaaggcataccgaattgagtcaacaattcacgagcttcttcatctgttttagcacttgttactacgatgatatccataccagtaacgcgttctacctgatcatattcgatttcagggaagatgagctgttctttaagacccaaagcgtagttaccacggccatcaaatgcagttgcgctgataccgcggaagtcacgtacacgaggtaatgccgcattgatcaatttatcaaggaattcatacatgcgttcgccacgaagagtaacttttgtacccaacgccatgccttcacgaactttaaagttcgcaatagattttttagcttttgtgattacaggtttttgaccagcaataattgttaagtcattaactgcagcttctaaagcttttgcattgcctacagcatcgccaacgccgatgttgataacgattttttccaatttaggaatttccattacgttgccgtattggaatttttcttgcatactctttctaatttcagagttgtattgttcaaataaacgagacatttatgtagctcctcctttcctgattatttaagtactgtaccggatttaacagttgcacgaacgaatttaccgtctttaccttcaacttttttgatacgagtagctgttttagtttctgggtcaacaaccattacgttagaaacatggataccagcttctttagtaacgatgccgccttgtgggttagcttgagaaggttttgtgtgacgttttacagtgtttacgccttcaacaaatacgcgttcttttttaggttcagtagcaattactgtaccttgcttacctttatctttaccggagataacaacaactgtatcgccttttttgatttgtaatttagccatatgctgcgttcctccttcttataatacttctggagctaaggaaacgattttcatgaagtctttttcacgaagttctctagctacaggtccgaagatacgagtaccacgaggggttttatcttctttaataactactgctgcgttttcatcaaaacggatataggaaccgtcttgacggcggataccttttttagaacgaacaataacagctttgactacgtcgcctttcttgacaacgccaccgggtgatgcatcttttacagaagcaacgattacgtcaccgatattgccgaatttgcgataagaaccgcccatgacttggatgcacataatacgttttgcaccagtgttgtcggcaacattcaaaattgtttgttgctggatcatcgtctattcctccttacatcactcttatttttgtctttcaagaatttcaacaactctccaacatttatctttagaaagtggacgagtttctacaattttaactgtatcaccaatgcggcactcattattttcatcatgagctttgaagcgtttattgctaaccattggcttattatataatgcgtgaggtactttacgttctacagcaacaacaacagttttttccattttgttgctaacaactttacctacgcggactttacgtacgtttctttcttctgccacgattttaagcctccttttcaaactttaacaaatctgtcattatgcgttttcagatttaagttcaacttcacgttgtacagttttaatacgagcgattgtcttcttaacttcacgaatgcgcataggattctctaattgacctgttgcaagctgaaaacggaggttaaataactcttccttaagaccggaaactttttgttccatttcggcagcgctcatattgcgaatgtcattaaccttcatttacgtcaccacccaattctttacccttaacaacaaatttgcatttgattggaagtttatggcttgcaagacgcatagcttcacgagctacagcttctggcacaccgtccatttcaaacattacacgacctggtttaactactgctacccagtattcaggagaacctttaccggaacccatacgagtaccagctggtttagctgtgattggtttgtcagggaaaattttaatccatacttgaccgccacgtttgatataacgagtcatagcaatacgagcagcttcgatttgacggtttgtgatccaagatggttcgcatgctaccaagccgaactcaccatgagacactgtattaccgcgcatagcacgacctttcatacggccgcggaattgcttacgatgttttacacgctttggaataagcattacttgccaccttcttccttcttagcaggttgttttgcttctggcaaaacttcacctttgtaaatccatactttaatgccgatacaaccataagttgtatgagcttcagcagtaccgtagtcgatatttgcacgaagtgtgtgcaatggaatggaaccttcacggtaggattcgctacgagcgatttcagcgccaccaagacgaccgctaaccatgattttgataccttttgcacctaagcgcattgtacgaccaacagcttgtttcattgcacggcggaaaccgatacgacgttccaattggccagcaatattttctgcaacaagaactgcatccatgtctgcttgtttaatttctgcaatgtttacgtcaacttgtttatcagtgaaacgagtcattgcttttttgatatcttcgataccagcaccaccacgaccgataaccatacctggttttgcagtgtggatagtcaatttaatacgtttatttgtacgctcgatttcaatgcgggaaataccagcaatgaaaagggtttctttcaagaagttacgaatttttacgtcttcatgaagattagcagcgaaatctttttctgcataccactttgcgtcccaatcttttacgataccgacacgcaaaccgtgtggattaactttttgacccactctgtttccctccttcttaagctctttctttaactactactgttacgtggctagtgcgtttcaaaattttgaaagcttgtccacgggaacgaggatgaatacgtttcaatgtaggaccttgatcaacgaagatctcggatacatataagttatccacattcatatcaaaattgtgttctgcatttgcgattgcggaacgcataactttttcgactacatcagcgccaactttcggagtgaacttcaagatggcaaatgcctcgccgatgtttttaccgcgcactaaatcagcaacgatacggattttacgaggcgcgattcggatatgtctagcgattgcttttgcttccattaattattcctcctattttttgcctgtagatttttcgtccttaccgtgacctttgaaagtacgtgtaggagcgaattcacctaatttatgacctaccatatcttctgtaataaatacaggtacatgtttgcgaccatcatgcacagcaattgtgtggcctacaaaactagggataatagtagaggcacgggaccaggtttttacaactttcttttcgttagtttcgtttaaagcatcaactttcttaagcaaatgatctgctacgaaagggccttttttaatagatctggacactattttatctcctttcctttatcctattttgtacgacgtttaatgattaagctgttagaagcttttttcttgtcgcgagttttaacaccatgtgctggtttgccccaaggtgtaacaggatgtttacgaccaacaggagatttaccttcaccaccaccatgtggatggtcacaagggttcattacaacaccacggttaccaggacgaacgcccatccaacgatgacgaccagctttaccaattactaggttgctgtgttcagcgttgcctacaacacctacagttgcacggcattcttgacgtacgcggcgcatttcgccagatggtaaacgaagaatagcatagccattatctttacccatcaattgagcggatgtaccagcggaacgaacgatttgaccgcccttaccgatttttaattcgatgttgtggatttgagtaccgtctgggatattagccaatggtaagcagttaccaggtttaatatcagattcaggaccggagaatacaacgtcaccaacttttaagccgttaggagctaaaatataacgtttttcaccatcagcgtagttaagcaaagcgatacgagaagaacggttaggatcatactcgattgttgctactttagctgggatattatctttagtacgtttgaagtcaatgatacggtattgacgtttatgaccgccaccttggtgacgaactgtcattttaccagtattattacgaccacctttttgggaaatcttagctaacaaagatttttctggtttgcttgctgtgatttcgtcgaaggcggatactgtcataaaccggcgaccagcggagtacggtttaaatgatttaattgccattagtgggcctccttacaactagactcttagacaccttcaaataatgtaatggattcgccagcttttaaagttacgatagcttttttgtaatcgctacgtttaccttgtgtacgacccatgcgtttagttttgcctaatacgcgaatagtagctactttttctacttttacattgaagattttttcaacagcttgacggatttgcactttatttgcagtcaaaggcacgcggaacgtgtatttgttttcttccataagctttgtggatttttcggtaataaccggacggattagtacatcatgtaattgcattatccaagtacctcctcaatttttgcgacagcgcctttagtaatgaagagcttatcgtaatgaagaagatcgaaaatgttcataccttcgcaagccaatgctttaacaccttggatgttgcgagcggaacgttcaacatttacatcaccttcagtgatgaacaatacttttgcatcgccaacattgaagctattgataatattcaatacttcttttgttttaggagctgctaatgtgatttcttccaaaacgtataattcgctattatttaccttatcgctaagagcagatttaactgctaaacgtctagccttacgaggcatagctttgtaatagctgcgaggttgtggaccaaatgtagtaccgccaccaatccagattggggaacggctggaaccggaacgtgcacgaccagtacctttttgtttccaaggtttacggccaccgccacgaaccatacctctagtttttgttgcatgtgtgccgagacgttcgttagacaattgacgaactacggcttgatgcataacggcttcgtttacttcaacgccgaatactgcatcgtttaactgtatttcaccgactttaacgccggattgattatatgttgctactgtaggcattacataatcctcctttcgacaaatgattatttaacaggtttaaccgtgttgcgaaccataaccaagctacctttagcgcctgggataccacctttaaccaataaaaggttacgttcagcatcaactttcacaacggataagcgttgtacggtaactctgtaaccacccatttgtccagggagttttttacctttgtataccttaccgccgccaccggagatcataggaccgatggaaccaggttcacggtgagatttggagccatgagtttcaggaccacgagagaaattatggcgtttaattgtgccagcaaaacccttacctttacctgtacctactacgtccaccaattcaccttctgcgaagatatcagctgccagagtttggcctactgtgtagtcagctgcactgtcaacgcgaacttcgcgaagatatttaactggagctacgccagctttgtcgaactgaccttttacaggttttgttaaatgtttttctttaatggaaccataaccaatttgtactgcttcataaccgtctgtttcaacagtcttaacgcgcactacaacgcttggggtagtttccactactgttacaggaactaattggccttcagctgtgaagacttgtgtcattcctaattttttacccaaaatagctttagacattatcgcacctccttatagttttatttcaatagatacaccagctggtaaatctaaacgagtgatagcatctactgttttcgaatttggttcaagaatatcgatcaagcgtttatgtgtacgcatttcgaattgttcacgggaatctttgttaacgtgtacggaacgaagaatcgtgaagatattcttttctgttggcaatggaatcggaccagataccatagcgccatttctttttgcagtgtctacgatcttagcagcgctttgatcgagagctttgtggtcgtatgccttaaggcgaatacggattttttgctgtttagccattattaataattcctcctgtcgtccatttcgtgaatgaactgctccatagaaattctcctccgcagaggcaaccttctacttcatagtttgaaaacacaacacgagagcggcagaacatgccgctcttacatgtcgtggatattgtgcccaacgcatcactacgatgagcataaaaggttaaattaaccttcgatttcagttacaacgccagcgcctactgtatggccaccttcgcggatcgcgaaacgaagaccttcttcgatagcgattggagtaatcaattcgatattcattgttacgttatcgccaggcatacacatttctacaccttcaggaaggtttacaacacctgttacgtctgttgtacggaagtagaattgtggacggtagttggagaagaatggagtatgacggccaccttcttctttagtcaaaacgtatacttctgctttgaattttgtatgtgggttgatggaacctggtttagccaatacttgaccacgttcgatgtctttacggtcaacaccacgaagcaatgcaccaacgttgtcacctgctactgcagagtccaaagttttgcggaacatttcaagaccagttacaacgtattgttcagctttttctttcaagcctacaacttctactgtgtcgcctacatttacttgaccacgttcaacacggccagttgctactgtaccacgaccagtgattgtgaatacgtcttccacaggcatcaagaaaggtttgtcagtatcacgaactggagttgggatgtaggagtctacagctgccatcaattcgtcgattttagctacatattgagcgtcgccttccaaagctttcaaagcggaacctacaacgataggtacttcgtcgccagggaattcgtaggaggaaagaagttcacgaacttccatttctactaattcgatcaattcttcgtcgtcaaccatgtcagctttgttcaagaatactacgattgcaggaacaccaacttggcgagccaacaagatgtgttcgcgagtttgaggcatagggccgtcagctgcggaacataccaagatagcgccgtccatttgagccgcaccagtgatcatgtttttaacatagtcagcatggcctgggcagtcaacgtgtgcatagtgacggttttcagtttcgtattcaacgtgtgcagtgttgattgtgataccacgttcacgttcttctggagctttatcgatcatgctgtaatcttggaaatcagcttggcctttttcagccaatactttagtgattgcagcagtcaaagtagttttaccatggtcaacgtgaccgattgtaccgatgttaacatgcggtttcgtacgttcaaatttttcttttgccattttaaattatcctccgaggaaaatagtaattctattaatctaatgtaagattaaccgtttttctttgcttgaatttcttcagcaattttcttaggaacttcttcgtaatgatcgaatgtcatggagtagttaccgcgaccttgagttttggaacgaaggtcagttgcgtaaccgaacatttcgctcaatggaacatatgctttgatatgttggttaccattacgagcttccatgccgtccatgcgaccacgacgagagttcaagtcaccgataacgtcgcccatgtattcttcaggaacgtctacttctacggacatgtatggttcaagcaatgcagggtctgctttgcgagcaccttctttaaagcccatggaaccagcgattttgaaggccatttcgttggagtcaacgtcatggtaggagccgtcaaatacgataactttgatgtcaaccattggataaccagcgataacaccggattccatagcttctttaacaccattttcaacaggtccgatgtattcacgaggaattgcaccacctacgaccttattttcaaattcgaagccagcacctggttcttgaggaattaattccagccagcagtgaccatattgaccacgaccaccagattgacgaacgaatttaccttcagctttaacagctttacggatagtttcgcgataagctacttgaggtttacctacgttacattctactttgaattcacggttcatacggtcgacgatgatatccaagtgaagttcgcccataccggagataatagtttgacctgtttcttcatcagtacgaactttgaaagtaggatcttcttctgccaaacgagcaagagctgtacccattttttcttggtcagcttttgttttaggttcaacagcaacggagataactggttcagggaattccatggattcaagaattacaggattcttttcatcacaaagagtatcaccagtagtagtatctttcaagcctacagctgcagcgatgtcgccagcgtaaaccatgtcgatttctttacgagtgttagcgtgcatttgaagaatacggccgatacgttctttcttaccttttgtggagttgaaaacgtaggaaccggattccaatgtaccggagtacacacggaagaacgctaatttaccaacataagggtcagccatgattttgaatgccaatgcggagaatggttcatcatcggaagaaggacgagtagtttcttcttcagtaccaggaacggtacctttaatagctggaatgtcgataggagctggcatgtaatctacaacagcgtccaacaacatttgtacacctttgtttttgtaggaagaaccacaaagaactgggaacaattggttagcaataactgctttacgcaatgctgctttcaattcttcaatggagatttcttcaccttccaaatatttcatcatgatatcgtcatcagtttcagcgatagcatcgatcatcatttcgcgacgagcttcagctacttcttgatattctgctgggatatcagtgatttcatattctttaccgtcatcggatttgtaaatttccgctttcatagtcatcaaatcgatgatgccttcgaaagtatcttcagcgccgattggcacttggatagctacggaatttgcacccaaacgggatttcatcatatcaactacgttgaagaagtcagcacctactgtatccatcttatttacataagcgatacgaggtacgccgtagttagatgcttgacgccatactgtttcggattgaggttcaacgccacctttagcactgaacaccgctacggagccatcaagtacacgtagagaacgttctacttctacagtaaagtcaacgtgaccaggagtatcgatgatattgatacgatgatctttccagtgacatgttgtcgccgcagaagtgattgtgataccacgttcttgttcttgcgccatccagtccatcgtagcagcaccttcatgtacttcgccgattttgtgaacaatacctgtatagtagaggatacgttctgtagttgttgttttaccagcatcgatgtgagccatgataccgatattacgagtttttgctagggaaaactctcttgccacagttgtcacctcttattaccaacgataatgagcaaatgctttattagcttctgccattttatgagtatcttcttttttcttgattgcagcgcctgcattgttgaaagcgtccatcaattcgcctgctaagcgttctttcatagtgcgttcaccacgaagacgagcgtagtttacaacccaacgaataccgagggtttgacggcgatcagcacgaacttcaactggcacttggtagttcgcaccaccgatacggcgagcacgtacttcaagtacaggcataacatttttcaatgcttgatcaaaaacttccattgggtcttgacccattttggaacgaataatttcaaatgcatcatatacgatagtttcagcaatgccttttttgccatcgtacataactttgttaatgaaacgtgttactaatttgctgttgtacaccggatctggaagtacatcacgtttcggaacagggccttttcttggcatgttcaattcctcctttatattgatgtgtgttaatttcgtttaatggctaaaattattttttagcttttttcgcgccgtatttggaacgactttgcatacgattttgtacgccagctgtatccaatgcaccacgaacgatgtgataacgcacacctggaaggtcttttacacgaccgcctctgataagtacaacactgtgttcttgtaaattgtgaccaatgcctggaatgtaagcagttacttcaatagcgtttgtcaaacgtacacgggcaactttacgaagcgcggagtttggtttctttggagtagctgtgtacacacgagtacatacaccacgtttttgtggagattcttgaagcgctggagctgtagattttttagtcaagctcatgcgacctttgcgtactagctgattaattgttggcatttgggcacctcctttccaaatttgagatttataattgatccgtcataacaaattgttacatcggatattaccgagattaacgtaggatgcctaccgctgtggcccgcaccttaatgcggcacgcacgaccaaggtcatccatcgtatgcttatcgtcgaacggtatattatgttccacgcaagccatccgtacaggatctactacgtagctatcgctatcgcagccgagaaacacaaacttaacagagccttttgcaattgatttaatcgtttgcttagcacctattgtcttgttcgccgatgccaaatgggcaatgtccatggttacatcttctccttacgaaactatgctcagggcgcacttgccctctaagcactatgtaagtatatcaattactcaaacgcatgtcaaaggttttttaacactcaaaaccgctattttactgtatttaatatgtacacctatccgtgtgtatcatttataagaattacatgaagtattctcgtttttttatacaaatatagataatttcgcttatttttatacactttatacatattcaattctattggcgcagtcttgttatgcaaaattgatataacaaaaaagagatatccctaaattatataacaatctaggaatatctcttttattttctaatcatagctacaagctataaaatcttatttttctatgatttcaccgtcatcagttaattccaaaatttcaggagcctttttaactacttcaattttacggtaacggctcataccagtaccggcaggaatcaatttaccgatgataacattttccttaagacccaataatggatcgattttgcccttaatagcagcatctgtaagaacacgtgtagtttcttggaatgatgcagcagacaagaaggaatctgtagccaacgcagctttagtaatacccaacaatgtacgtttaccagtagcattttcacggccattcaatgttaaacgacgattttcttcatcaaatgtgttgatatcaatcatgtcgccaggaagcatatctgcatcgccagcagtttcgattttaaccttatgaagcatttgacgaacaataacttcaatgtgtttatcattgatttctacaccttgagatttatatactttttgtacttcgtatacgaggtaacgttgtgttgcttgtgtgcccattacacgcatgatgtcatgaggattaatggaaccttctgtcaaacgtgcgcccaaggatacaacatcaccgtctttaacgataatgcgggaaccataagggatgaggtaatcgagttcaatgccatcttcacctgtaataaagatagtattagtaccttttttaccttcgttaggtacaacacgtactacaccttcattttcagcaatgattgcattacgttttggtttacgagcttcgaacaattcttcaacacgaggcaaaccttgtgtgatatcgtcacctgcgacaccgcctgtatggaatgtacgcattgtcaattgtgtaccaggttcaccgatggattgagccgcaatgataccaactgcttcaccgacttgaacttggtcacctgtaccaaggtcacgaccatagcacttacgacatacgccataagggctgcgacaagtcaatacagaacggattttaacaacatcgtaatgtttcacaacttcatcagcaagttcttcagtaatttcaccattcaatggaacgataacttcaccagtttccttattgattaattcttcagctgcaatacgacctacgatacggtctttcaatggttcaataatacccgtaccttcaacgatagcttctacttcaataccgttgatttcattattgcgtacttgtacctcttttacatcagagtttagaattgcttcgattccttcttctgtaaggcgtgtatcagcagggtagatttctacgccattgctgtccacgatagcattcacagtatccttgttcaacatattttgaatcatagtttcttttaatgtcgcacggatactatcgtcgctttcaccaagaagaatcttttgtaccaaattagtatggttaatatcgctatccgatcccaaatgtgcaccgcgcaaggagatagctgttacaccagcatctgcgatatctgctaagctttgttcatcaagaatagtttctgcaggaacagccaattcacctgtttcagcatttactacatctttatcgagaacgcggccaatcaatttgtctttcaacatttcaagagcttgacgtggagatgtagccaaacgagcgcgttcacgaacgagatcgatacctacaacgtcacaatcgtcctcacgaacgataacgtcttgagatacgtcaacaagacgacgagtcaaataaccagagtcagctgtacgaagtgctgtatcggccaaacctttacgagcaccatgagaggacgtaaagtaatccaatacagtcaaaccttctttaaagtttgccttgattggcaagtcgatgatacgaccagatgggtcagccatcaaaccacgcataccagcaagctgacgaatttgttgtttgttaccacgggcaccggagatagccatcatatatacagggttgaagccatctttatcgcgcgccatattatccatcatggcatcagtaacatcttctgttgcttttgtccacaattggatagttttacgataacgttcttcttctgtaataagaccacggcgatatagacgagatactttttctacttcttgttctgcagtatcaagtaaatcgaatttttcttctggtactttaatatccgcaatggctactgtcatacctgcacgacgtgcaaaggagtaaccaagagatttaattctgtctaagagttcagcagttttttcattgccgaataattggaaacattgatctacaagtttaccaaccgtcttcttatccataaccttacccaatgtgtaagtaccgtcttctttttgttcatattgccataattctgggaacaaagcgttgttaaagatcaaacgaccagctgtagtttctacgcgaccgtgttcaggcaagcgaatgtataaaatatcttgcaatccgataacatgagaatcgtaagcaagcattacttcgtcatatgtagcaaatgtttttgctttatcacgagtatcttcgcgtacaactgttaggtaataagtacccaaaatcatatcttgagatggaatagcaactggcttaccatcttttgttgataagatattatgaacggatagcatcaatgtacgagcttcggattgagcctctacggacaatggtaagtgacaagccatttggtcaccgtcaaagtcggcgttgaaggctgtacatactaatggatgcaatttgatagcacggccttcccaaagaattggttcgaaagcttgaataccaagtctatgcaatgtaggggcacggttcaagagaactggatgttctttgataacctcttccaaggattcccatacaccaggacctacgcgttctacttggcgcttagcagccttaatattggatgcttgtccacgttctaccaagcgtttcataacgaatggcttgaacaattccaatgccatttctttaggcaaaccacattgatgcattttaagttctggacctactacgataacggaacgaccggagtagtcaacacgtttaccgagcaagttttgacggaaacgaccttgtttacctttaagcatatcggacaaggattttaatgggcggttgccagggccagtaacaggacggccacgacgaccattatcgatcaatgcatcaaccgcttcttgcaacatgcgtttttcattgcgcacgatgatatcaggagcacctaagtccaacaaacgtttcaaacggttgttacgattgataacacgacgatacaaatcattaaggtcagatgtagcaaagcgaccaccatctaattgaaccatagggcgcaattcaggtgggataacaggaacgacatccataatcatccattctggacggttgccagattgacggaatgcttctactacttcaagacggcgaacggcacggattttacgttgaccacttgcagtgttcaactcttcgcgcaattcagcatttaattgttctaaatcaagttcagataataatgcttttaccgcttctgcacccatgtcgatacatacgaataagatttcttctgtagcacctaattcgtaacgttcttcacgagtcaattcttcatattctttatcagcttctggaattgtagcatcttcacgaagtgctgcattataacgttctttacgttgtgcttcacgaacgatagccaaacgttcattacgttgtgccacagtttcgataactacggatttaccaccgatagtatatccttcttcattgaattgagcttcgtattcacggtattcttgttcagataacaattggcgttttgccaatgggctacctgcaggatcaactacgatataggaagcaaaatacaatacgcgttccaaggaacgtggagatacatcaaggataaggcccatacgagacgggatacccttgaagtaccaaatatgggatacaggtgtagccaattggatatggcccatacgttcacgacgcactttagcacgtgttacttctacgccacatttatcgcagacaacgcctttatggcggatgcgtttatatttaccgcagtgacattcccagtcctttgttggtccaaaaatgcgttcgcaaaatagaccatcacgttctggctttaacgtacggtagttaattgtttctggttttttaacttccccatgagaccattctaaaatttgctctggagaggctaaaccgattcgcatggaatcaaattcatttacgtctagcactactatcgctcccttcctaatattcagtatcagtcttcatctgcagaggattcactaattggatatgctaattggctaagaatatcatcatcgccaccattagatacttcttcctctgcttctgggtctacaactgttacttcatctgtttcaacagcatcgccgtccataacatcttcaataccagtttctaccacttcatcttcgtcatcaagttctttcataacaacttcttcttgatcttcgttcaagatttttacatcaagaccgatactttgaagttctttgagcaatactttgaaggactcaggcacacctggttcaggaatattttcgcctttaacgattttttcgtatgctttaacacgaccaacaacgtcgtcagacttaacagttaatagttcttgaagagtataggctgcgccatatgcttcaagggcccaaacttccatttccccgaaacgttggccaccaaattgagctttaccacccaatggttgttgtgtaacaagggagtacggacctgtggagcgcgcatgaattttatcatcaaccaaatggtgaagtttcaacatgtatacgtaaccaaccgttacacggttatccataggttcaccggtacggccatcgtacaatatggttttaccatcatctgggcgaccagcgatatccaatgtttcgaatacatctttttcatgggcaccatcaaatacaggtgtagcgatatgaataccagctacatccggttttggcataccataagtatcatagtcatagcctaatttttccaaatctttgcgaatttcaacgcgtttagcacgagcttcttcgatatggttcaatgtagcacgtaccttgttgatgcgttctaattcttcaacaagagctggatccatttcaggcacttcttcttcagtgccgaaatattccatgtgaagtgcattgtatttagattctaatgctttcaattcattgtaacgagcttcgccaccaagtgcagccaatttcttttgagcagcttcttctacgtgacctaagatttgagatttcaaatcgatgattttttcatcaatatcaaaatgagctactgttacatcttctttcgctttagcttctaactcttcaatttcagcatataatttgcgaattgcatcgatttgttcccaataggattcatcagtacgcgcttctttcaatacattttgaatatgaagatctgtagccttaattttcatgcccaagccttgaacagcccagcctaagtgagtttcaagaacctgaccaatgttcatacgagaaggtacgcccaatgggttcaatacgatttgtactggagtaccatctggaaggaatggcatatcttcttttctcattacgcgagaaacgacacctttgttaccatgacgaccggccattttatcgccttcgtggattttacgtttttgagcgatgtaaacgcgaacaagtttgtttacacctggttgtaactcatcaccattttcacgagtgaacactttaacgtctacaaccttaccacattcaccatgaggcacacggagggatgtatctcgaacttcgcgttctttatcaccaaaaatagcacgtaacaaacgttcttctggtgttaattcagtttcgccttttggtgtagctttacctacgaggatatcaccaggatgtacttctgcaccgatgcaaatgataccatcttcatctaggtttttaagtgtatcatcaccagtattaggcaattcacgagtgatttcttcggcacctagtttagtgtcgcgcgcatcacattcgtattcttcaatatgaatggatgtatagatatcttctttgcaaagttcttcactaagcaagatagcatcttcgtagttataaccttcccaaggcatgaacgctacaagaacattaaagccaagagccaattcaccaccatcagtagcaggaccatcagccaatacttggccttttacaacatggtcaccacgattaacgattggtttttggttaaagcatgtggattggttagaacgaaggaatttattcaaacggtatgtatcaacacgaccatcgctatcgcgaagaacgtggatttcattaccccagcaacgtacgactttaccagcttcgcgtgccaatacgcaaacgccagagtcagtagccgctgtatattccatacctgtaccaactaaaggtgcttgagcacggagcaaaggcaccgcttgacgttgcatgttcgcacccatcaaggcacggttcgcatcatcgttttcaaggaatggaatcatagctgtaccgatggatacaacttcttttggactaacgtccatgtaatcaaccttatcaggtgttacttctaatacgtcatgaccacgacgacatgctacatggtcattagcaaaacaaccgtctgcatcaagaggggagttcgcttgggcaattgtcatgccttcttcttcatcggcagtcatataagcaacgctttcagatacgcgtacttttacaaccttatccgcgtcagcaccttcgccgtaaattttttcaaccttacggtatggagcctcgatgaaaccgaattcattaaccttcgcatagttagataaggagttaatcaaaccgatgttaggaccttctggtgtttcaataggacacatacggccatagtgagagtgatgcacgtcacgaacttcgaaacctgcacgttcacgagataaaccgccaggtccaagggcagatagacgacgtttatgtgtcaattctgctaatgggtttgtttggtccataaattgagacaactgagaagaaccaaagaattctttaatcgctgctacaacaggacgaatattaatcaacgcttgaggcgtaatggattcaatttcttgaattgtcatgcgttcacgtacaacacgttccatacgagtcaagccaatacggaattgattttgtaacaattcacctacgcaacgaagacgacggttacccaaatggtcgatatcatctgtatgaccggcaccatccatcaagttcaagaggtaagagatattagcaatcatatcttctcttgtaactgtacgatggttaaattctaagttgcagttgttgcaaatgattttggatactacaccatctgaattagtaatatagaattcagcaaaaccttcgccgctaaatacaccgctcttagcaacgatatcaagttgttcttccccaacttgtacgcctgcatcaaggatgatttcacctgtttcagtatcaacaattggttgtgccaatgtttgacccaacatacgttgacgccatcctagttttttatttaatttataacgacctacgcgcgctaaatcataacggcgagcatcgaagaataaattatcgaataaattacgagcagattctacagtaggaggttcacctggacgtaattttttatagatttctaccaatgcttcatcagcagattgagttgtatctttttccaatgtacgaacaatgcgttcatcatatactggtaaaccatcttcatctgtttgaccgttccagaaaagatcaagaatactttcattagtatcccaacctaatgcacgaacaagcacagtagctggtaatttacggttacggtcgatacgaacggctacaacttcgctagcatctgtttctaattcaatccaagcaccgcgatttgggataactgtggattcatacaaacggttacccatggtatcgatttctttaccatagtaaacgccaggggaacgtactaattgagatacgataacacgttctgcaccattgataatgaaagtgcctgtatccgtcatcaatgggaaatcacccataaatacttcttgttctttaatgtccatattttcaggatcattattaactaaacggatatttacacgaagtggtgctgcgtatgtagcatcacgatttttgcactcattaatatcatacttaggctcacctaagctaaaaccttcaaaagaaagtactaaattacctgaattgtctttaatcggagaaatatcgttgaaaatattttgtaaaccgctctccaagaaccattcgtacgatttacgctgaatgtccaacaaatgcggcatcttaataacttcgttaatttttgcatatgtataacgagtccgtttgcctacctgttcaggtttgaacatatgtgctttccctccttcaaatacactggtccaccatatttctataacggcatagaaaagacatcttacaggtctcagttttcctgctttaataacgccaaataagcaaggcccttttttatttaaaaaataaccttgctctgttcattatccaagcacaaccttggaagaaaacccttaatacgtaagttatagcttctacatggaaaagtagaaaatgctacttttccaatttataattctatcatcatataaaaaagctgtcaaccaaaaggctgacagctttcacattttcacgtattattcacattatatgacaaagttcattaataaaaattaatttcctttgtgttttaacaaatcagcagcggcaataccagggcgtgtcatttctttaggagaaagaatatgattgatttcatcctcggtcaataaacctttttctaggataatatcgcgaatagcacgaccagatgtgtaggcttcttttgcaagtgcagaagcggtttcataaccaaggtgaggcaacaatgcagttacgataccaacagaacggttcaaccagtattcgcattgttcacggtctacttcaagatcgataagcaatttatcaacgaatgtgttaacaccatttttaaggtagcaaagattattgaacaaattgtaagccaatacaggttccattacgttcaattcaaattgaccattttctacagccaaagaaatggtaagatcgttaccgataacttgataacatacttgattcaatacttcggcgataactgggttcaccttaccaggcataatggaagaaccgggttgacgagcaggtaatttcaattccccgataccacaacgagggccagatgccatcaaacggaaatcgttggccattttaatcaatacaagagccgtaaccttcaaaccactagagatatcagcaaagatatccgtgttgttcgtagcatcaatcaagttatctgcagtatagaatggttcgcctacgacttcgctaagttcgtatgctacgtcatgaatgtaatttggttctgcattaaggcctgtaccaacggcagtagcccccatattgataacatgtgctccttcaacagcagatttaatacgtctaataccacggcgaacacctgatgcataagcacccatttcttgacctaatgtaataggcaccgcatcttgtaaatgagtgcgccccatttttaaaatttcgctatactcatcagcctttttctcaagttcatccacaaggcgttgcaacgcttcaagcaaaggtttagatttcaaaatcgcacaaaccttaatagccgttggaaatgcatcattggtagattgcgccatattacaatggttattaggacttacaatatcataggatccttttggatgacccaaaatttcacaagcgcggtttgctaatacttcattcatgttcatattcacagaagtacctgcaccaccttgaattgggtcgactggaaattgatctgcaaattcgccggcgatgacttcatctgcggcttgaacaatggctttaccaatagatacattgaggcgacctgttttcatattggccaaagcggaggccttttttaccattgctaaagctttaataaaatcttggtctaaatgttttcctgtaatgtgaaagttttctaatgcacgaatcgtttgtacaccataatataactcatcagctacttctaattcacctaggaaatcatgttcttttctcattgctatccttctttccactgaatgtgtatatcattcaaattacattgtataaaatggtctttcttttgaatttattataacatgtattttgtatacacaaaagtcatttaaggtattccataaaaacaatattctatataatttctctcatgacatatctgaacattgcaaagtatagtaaaatataagcatatactattaacataaaggagtgtttaaaattaacataaatcatcgaacacgaatcatagcgctgtttttaattacagtcataagctatggtttttataatgcctatataccgattaccgatccagtagaatctaactatgtattaagtgccataaccatgttaactcacaattcatggatttcacctatgatttatgaccatgtatggtatgataaaccaccattaacatattgggcacttatgatctgctataaattgttcggtatatcagattttgtatcacgcatccctaatacattaattgcaggggccagtgtatcactcatgtatcacatggtataccgtatcaaacagtccgtcccagtcgcagtaaccagtgccatcctcttgatgagcaccttacaattttggtatatatcacatgcggttataacagatggctttttatttttctttagtcttgccatatttggttatgcttacctagcttttacaaacaatgataagtcgtcgatgatgaaagcctatattgcagctgcctttgcagtcttaacaaaaggacccatcggattactattaccaggactcatattattagtgtttatggtccttcaaaaatatagtaaaaccaataaggatgaggtaagtttactaagaaatttaaagattgcctttacaccgctaggtattgtattatttttcgccattgctactccatggtacatagcaatgtattctattcacggccaagattttattagtggatttcttggtctacaaaatgtaggtcgtgccctcgtatccgaacaccctaaattcaacgtgtggtactactatctaataattacgccgcttgctttattgccatggacaccagtggttatatatcaattgcggaaactgaactggaaggaatcattcaacctacttggcgggatatggtttgttattatattactattttattctattgtagcaaccaagtatttaacctatacactacccgcgattattccatgtatcatatggggtagtgaggcaattatcaatttactgtttaaccctaatctatctaaatattgtacttctttagtaacactaccatttggcatatatacatgcattctaggtattggcgtagccgtcagtgctagcgactatatcttagagtatatgattatagttagcataggcgctctgatttttaaaatagctagacattacatacgaacatattcacaactcacattgctatttttgcttccaatactagtcctatactcagccactaccatttctgtgacgcccatattaacgagtcaatctggtattcagtttacatcttatatagaaaatacgaatcaacctgttttcgtatatggtggatattatacttcagtcgtgtattatacaaaacatataccaacacaagtatatttaaataagactgatgacgaacgctgggctaaggccagaaatattatgcctaccattaccaaagatgagtttttagatcaacttccaaacgagttaaatgctattgttatcgtacctaatcggaatataaaagactttgaaagttcacctgcatctgtcattacaaaaccattgggcaaaactaatggagctaccatatataaagtacaagatagtatttcattttaatagagcgtgcccttcggggcacgctttttaatatcaagtttatacagagtcgtttcagagtaatcagaacgcaaaaaaaggcgtacctttaggtacgccttttaatatggctagaattatttcaattctacagttgcgccagcttcttccaattgagcttttaaagcttcagctgcttcagtagctacgccttcttttacaggtgcaggagcgccgtcaacgatagctttagcttctttcaagccaagaccagttgcttcacgaacaactttgattacgttgattttggatgcgccagcttctttcaagattacgtcgaaagaatctttagcagcgccgccttcagcaccacctgcagctgctacagctacaggagctgctgcagttacgccaaattcttcttcaattgcttttacaagatcattaagttcaagaatagttgcttcttttaattcagcaacgatgttttcaatgttcaatgccattttagttttcctccataaaatagtttattgtatcggtcttaagcgaccaatgaataattcacagaaattattattctgcagcttgagcgtctgcaacagctttgacagcgtatgcaacattgcgaacaggtgcttgcaatacggaaagcaacatggaaagcataccttcgcggtttggaaggcttgcgattgctttaacgcctgcagcgtccataacttcgccttcaacgataccagcttttacagtaacaacttcttgttctgtagctttgatgaattgttcgattacacgagcaggtgcaacagcatcttctttagaagtagccaatgcagttggaccttctaaatgctcagagaaaccttcaagattcaattcgtttgcagcaatgcgagtcaaagtatttttgattactttgtattcaacaccttcagccaacattttgcgacgaagatcagttgcttgcgcaacagtcaaaccagagtaaccaatcaatacagcaccttttgcttcagaaagagtttctttcatttgagcaacgattgctttttttgattcagtgacagccattagattacctccttatagattttgtggtgctctatgtactatcttagcgtaaaaacgacctcatcgcacgcgatgaggtcgtaactagtcctaggttgttctagtgtcagcctcagcgggcggatttacatccattatacataccagccgtctacagctaagagacatatgtgattattgctctttggttacgttgctcaatttgaacacgttcaaaggcacaccagggcccattgtagcggacaaggttacagatttaatgtattgacctttagctgctacaggtttagccttgataatagtatcaacgattgtacggtaattgtcaagtaatttttcatcatcgaaagaagctttaccgatggagcaagaaatgatacctgctttatcagtacggtattcgattttaccagctttaatttcgtttactgcacgagcaacgtctggagttacagtaccaactttagggtttggcatcaagcctttaggacccaagattttaccaagacggccaacttgacccatcatgtctggtgtagcaactactacgtcgaagtcgctccaaccaccttggattttagctactaactcttcagaacctacgaaatctgcgccagcttcttcagctgctttaatgttgtcgcctttagcgaacacaagaacgcgtttagttttgccagtaccatgaggcaatactactgcaccacgaacttgttgatcagcgtatttagggtcgacattcaagttgaaagcgatttcaactgtttcatcgaaatttgcagttgcagttttcttaactaactcaattgcttcaactggttcgtagaacttaccagcttcaataagttttactgcttcagcgtatttcttacctacttttgccattataatatcctccttatgtggtcaaacgggaattccctcccaccgatttgcgcttatgcgcaagtcgtacgcttattagtcaacgatttcaatgcccatgctgcgagcagtaccttctaccatgcgcataccttgttctacggtattagcattcaagtcaggcattttcaattcagcaatttcacgaactttatcgcgacctactttagctactttatcacggttaggtacaccagatccttttgggatacctgcagcttttttcaacaatactgcagctggtggagtcttagtgatgaagtcgaagctacgatcttcatatacgttaataactactggaataatcaagccagcttgtttagcagtacgttcgttgaattcttttgtgaaagcaacgatgttaacgcctgcttgacctaatgcaggaccaactggtggtgctggagtagctttagcggcttcaatttgtagttttacttgtttaactaatttcttagccatgggtaattaaacctcctatgattctactgtggtggtaacggataaacatcctcccactgcaaccaaaatcgattgctcttttagagttatatttatatattaaagagctttttcaacttgagaaaactctacctctacctctgtatctcgattgaacatttctacattaagtttcaatgttcctttttcagggttaatttcggtaataacacctagtctatcttcaaaggcaccggatgtaatgcgtaccgtttcaccaacctctacatcgacgttgattgttggtttcttatccaagccctgagacttaagtatatgttctacttcggaatcagaaagtggaactggtttagtggcagagccaacgaaacctgttacacctggtgtgttgcgcacaacataccaagaacgatcgttaacttccatttcaaccaatacgtacccaggaaatattttacgttttactacttttttaaccccatctttttcatctatttcatcttcaagaggtactagaattcgactaataacatcttgtaagcccatagattgaaccttaagttctaaagtggttttaactttattttcgtagcctgaataggtatgaattacataccacttcttatctgcttccatgtaatggccccctatccaacaatccgcaacaacatattaataagttgagcaaaaatcgcatcaaatacataaatgagtaaagcgataaatatagttaccaaaaatactacaattgtgtaattaatgagctcttttcttgttggccagactacttttttcagttcagcctttacgccgcggaagaatttaccaaatccgccacgttgttgtactgctgagttagactttgccatttgttcacatcctcaaatcaacaggtaatgaatgataagaattatttcgtttcacggtgtaatgtatgtttaccgcagaatttgcaatatttcatcatttcaatacgatcaggattgtttttcttattcttgttcgtttggtaattacgttgtttgcaatctgtgcaagctaaagtaatggcattacgcatccggacacacctcgctttatatttactaataagtctcttgtactcgaaaacgctcgactacatactaatgaatagtatcatatgtgtctagcaatgtcaagattttgagcaactcaaaaaagccaggcacatgtacctgacagggatagtataacaaaaaatggcgttccttgtctagaactttacacaaaaataggaccccttacggagtcctatttattacaaaggctactaattaaccttcgatttcagttacaacgccagcgcctactgtatggccaccttcgcgaatcgcgaaacgaagaccttcttcgatagcgattggagtaatcaattcgatattcattgttacgttatcgccaggcatacacatttctacaccttcaggaagatttacaacacctgttacgtctgttgtacggaagtagaattgtggacggtagttggagaagaatggagtatgacggccaccttcttctttagtcaatacgtatacttctgctttgaattttgtatgtgggttgatagaacctggtttagccaatacttgaccacgttcgatgtctttacggtcaacaccacgaagcaatgcaccaacgttgtcgcctgctactgcagagtccaaagttttgcggaacatttcaagaccagttacaacgtattgttcagctttttctttcaagcctacaacttctactgtgtcgcctacatttacttgaccacgttcaacacggccagttgctactgtaccacgaccagtgattgtgaatacgtcttccacaggcatcaagaaaggtttgtcagtatcacgaactggtgttgggatgtaggagtctacagctgccatcaattcgtcgattttagctacatattgagcgtcgccttccaaagctttcaaagcggaacctacaatgataggtacttcgtcgccagggaattcgtaggaggaaagaagttcacgaacttccatttctaccaattcgatcaattcttcgtcgtcaaccatgtcagctttgttcaagaatactacgattgcaggaacaccaacttggcgagccaacaagatgtgttcgcgagtttgaggcatagggccgtcagctgcggaacataccaagatagcgccgtccatttgagccgcaccagtgatcatgtttttaacatagtcagcatggcctgggcagtcaacgtgtgcatagtgacggttttcagtttcgtattcaacgtgtgcagtgttgattgtaataccacgttcacgttcttctggagctttatcgatcatgctgtaatcttggaaatcagcttggcctttttcagccaatactttagtgattgcagcagtcaaagtagttttaccatggtcaacgtgaccgatagtaccaatgttaacatgcggtttcgtacgttcaaatttttcttttgccattaggattatatcctccttcacaaaaacaaaatacttttatagtattactataatataataacctaatttaatcaacggaatatacattcctacagattattataccataatacacaaatgtcaataaacaaaaaattacatcctatttcgagggatgtaatgagttataattatatttttatagtagatacaaaaaaatccccaccaatgtgaggtttaatggtggcggcacacggatttgaaccgcggacacaccgggtatgaaccgattgctctagccaactgagctatgccgccatgtatggagctagtgaccgggattgaaccggtgaccttatccttaccaaggatacgctctgccgactgagctacaccagcacaatgaacgttcacttcactgtgaaattatggttgcggggacaggacttgaacctgcgaccttcgggttatgagcccgacgagctaccaactgctccaccccgctataaatggtggagggagaaggattcgaaccttcgaagtcgaagacggcagatttacagtctgctccctttggccgctcgggaatccctccataaataaaatggagctggcgataggaattgaacccacaacctgctgattacaagtcagctgctctacctattgagctacgccagcatcattacgacaagatgtattgtatcatctgacacactaagtgtcaagaaccttttaaaacttttttgaaaattttgttcgttcttcgcggtcacccttagtgctatatcaatatatcatgaaagtttttctgacgcaagtatttttttagaatttttccaacttcatttttgcctcataggaactcacatctaaactcacatatataaatagattattgctagaatagcaactataattcgataatatccaaacgacgccaacgaggatctatttagataccataaaaaaccttttaccgttatatatcccactatataagatacaacggtgccaatgataaacataatgatatcatttaattccaatacatgtatgacacgcactaaatcatacacacacacgataatcataacaggcacagccatgataaacgaaaaatcagctgcggccctccgtgtacagccgataagcatcccccctgcaatggttgcgccagagcgcgaaaatccaggccatagacaaagcatttgatatagacctatttgaaagcattgatatatagtcaaattatttacagaatccaccaatcgtccagatactgttcttttttcagcataaatcataaatatagcacctataataaggcctactataacgggaattggtccaaataaatactcttttataatgtattgcaaaagatatccagccattaatacgggtaacatgcccgcactaatatgtagcaaagatacgccgcgtgtttttatccaatttttccgttttaaaaagccgttaaatgtacgtctataatgtgtataaatagcaaggatggcacctatctgaataaacacttcaaatacatcagcatgtgtgccttcaaaattgagcatatgcccaataataatcatatgacctgtactcgatacaggaatacattctgttataccttctataacacctaaaatgagggctattacatattgttccatgtcattcaccttctttcaaaatgtggtcacaatgcatggcaatatataatgccctcattaattaatgtaacgctaattaatcaataaccataacacgctcaggtttagtgattgtcactaccgcatgttttggatcattattgtgttctaagtacaattgatcaccttcgagatgaccacgccaacctacaacaatcggatatgttttactaatagtctttaatagttcaagaggatttaaatttaatatcggtgcaaacaatacattaataccatcgataagaacaacttctgtatcactgcgacttaatgcacgacgaattacttcttctgcaagttgtggtctttcatcacgaggtactaacaaaaactcttcttcaataagttgtttggcttctagatacttccaccctttttgttctgataattcacgaatcaataaacttttaccagaacctgggccaccaacgataaacaatatgcgttcatcattattttgaatttgttcccaccgttctttcacatcttgtacagtaaccatatccttgcctcctcacataagatgacctatttaacaggtctgtcagacaacatcactgatttgatatattgatttttatcatctaaggcgaactgcaaataggaattattcaaccttggatttttatattcatataccgtagccgttcccgtactagttgtagattcagcaatacgtgtcggcataccatatacaaagagcaataaatatttagtatcacccatagcgataccacgacgtgttggtgtgtagacatttaataaaacgcgattaataagcgaattatcgtcaacactaacaccatattcattatagcctatgaacgtagacccaaacagcattccctgtgtacgccattcaccatttgcatcatttacaaaatgctgattcaaatgcaatccgcgtagtacaaagtcatcctcagtcaactgaccggcatggaaggaatacataggcgccttaggcaatccaaatcgagaccatacttgaccatccaaaatatcaacagcctctaccgtattatttttaatggtgaaagccacatagaactttccattttgaatagtttctggtaattggctattattatttgtattcgctacggaagaagaaaattcctttttttctgaccatgaattttcggaatgaccttcgtataagaagatatatgattcatcagtctgattccgccacatcgcattagggctaccataggagaagatcatttccatacgggaactgcctacgccgatatcacgaattgtaaccaatcctttatcagtagtatgaaaattagtaatagtaccaacagggaataaataagtcgcaccttgtccacgcaactgattatctactaaacgcgatttgtctgggcctgtatatacagttatatccatatctttttcatgatatgttgtgaatacacccttcacagtcttttgagcagatggactaggtacatacacatcaccaacgcgataaaccggtccaatacttgtaccatcttcagactcgggcttttgagccagactataatcatcctcatcaccaagcgctggtaaattattagacgtgtaagaacgtccgatatctgctagattattttttgaatcttgtggcataacaccatcattttcactagcagcttgccaatactgtaaggaatcaccaaaagcagtgacagccaactgttctgctaaccaacctgttttcgaagattcatcagcagcaggagctttcacaaccgctactgcattttttacttccggtattgttggtcctgcatcaacagcccccaccgatgcgattcctaaagcacttaacactgccatcgtcaaagcagtacgagataacatatgtttcattaacgcttctccatttgttctctaatccatgttaaccaaggcgccaatccatccttagcagtacagctaatttcaaatatatagccttgaggatttaaattacgaatatctttaatggctttatctttatcgaatggcacatacggcagtaagtcaatcttattgagcaatatagcttttgattccttaaaaataagaggatatttcaaaggcttatcttcaccttctgtaacagataaaacggtaaccttcatcgcctcaccaatatcgaactcagcagggcatactagattacctacgttctcgataataatcatatcgagttcatcaagatctaaatcagttatagcatctcgaatcatattagcatctaaatggcaacccccaacggtattaatttgtataacaggcacacctagggcatgaatacgttctgcatccttagatgtaaataaatcaccttcgataacagctaatttatagtctttaactaaatcttgaagtgttgcttctagcaaagaggtctttccggcccctggagagcccattagattaaagacaaatatatttttttctttaaatacttgttgtaacgatgatgcaatggcatcatttttcgccaacacatttgtttttacttctacttgcatatatacctcaatctatatcaatagatgtcacttgtaattcgcgaccacctatagtatttacaaaatggctttcacaatgaggacagatgaatttgtaatcttgtacatcaaatatcgtatcacaatctaagcattgtcctttaataggaatcgtatgaatatcgatttttgaatgctctgccggcgttttctttgtaacggcatcccagcagaataagagtgcatcaggttctacaccactcatcaaccccaaatcgagttgcacagaatgaatgatagacgcatcattgtttttcatggtctctaaggcaatatctaatataccctcagcgattgacatttcgtgcatggtacgcctcataaacagcttctaacatcatcgtagtcgtaacagagcccacaccacctggtacaggtgtgatagccgaagctaccttgctcaccgcctcataatcaacatcccctactgtttttccgtctaattcattaatgcctacatcgataacaacagcgccagctttcaccatattagctgtaatcatatgtgcgcggcccgcagcagcaatcacgatatcagcttgttgtacatggtttgctaaatcagccgtacgagaatggcaaatagaaaccgtagcatgacgttcaagcaccatcaacgctaccggtttgccaatcacttggctacgaccaacaacgaccacatgtttaccttctaaaggaataccataatgatccaagattgctaggcatgccttcgcagtacaaggtgcaaaaccacctttaccagctgtaacaagaccgatgttataggtagtaagaccatcgatgtccttcttagaattcaatgcatcaattaattgctccgtatcaatttgttttggcatcggcatgagtggcaatatgccatgcaccgcatcatcattattcaaagccatcaatgcatcgtatacctcttgatgcgtagctgtacttggtagttgcttacgcacgaaaccatagccaaaatttttggccgttttctccatgaaatccgcgtacatattagcgccatgatcatcaccaacgagcaatacagccattgtaattgtaccggactctagaccggtcatcttctcttgtaaaatctctttatgtgcatcagctacagctttaccacgtaattctatcatgtatatctccattcattatctaaaggataaacctcatataaattcatgtaaaaaggtgcctatagaggcacctttagttttctcttattctattatataacgttttgtctatagttgcagttacctatcctgcgactaatgactaaattgaaccacaataggtgtaccaggagatactacggttcccggtaattgttcctgtgaaatcgccttgccagtaccatctggtttaaagtataaacccgcagtatgcaaccaatcacgtacctctccaaatgtatagcctctaaagtctggcaatactacactgccatcaccattaggttttactgctggaagtttggccgctggtacagccgctacagtagcgccatccttaacggaaggtgacatttggtaataccgcactaattgagatacgatattcttaaatactggggccgcaatttgaccaccatagatagaaccttttttatgatcatcgatggcaacaagaacaacaaatttaggatcttctaccggaccaaagcctataaaggatgcgatataacgtcctgctaaatagccgccatttttggtgtctaacttttcagcagtccctgttttgcctccaaagtgatagccttcaaccatcgctttagtaccgccaccttcagatacttctttttcaagaatatccgcaatcgttttagccgtttcttctggtattggttgccccacaacttcagggtcagtagtactagttacctcaccttttatattgctgtaagatttaacaatatgtggtttcatcatactaccaccattagctatagcgccaaaagcacggaccatttgcaatggtgttaccgcaataccttgaccgatggacatggttgctacatcaagcttactcatatcatcaggattatataagataccatcgccttcaccaggcaattcaatacctgttttagaaccaaatccatagttacgaacatatttagataatatatccgcgcctgtagtggtaccaatttctgccatacctgtattgatggagaacttcaaaatatcgatcaatcgaacaggaccatagccttcaccattccagttttgcataacatgtccattggccgcaaaggaacctttgtcattatacacttggtctagtttccatttacctgatgccaatgcagcagatgcaataatcggcttaaatgtagaacctggttcatacaaatttgttactgcaatattcttaaaatcttcctctgaaccttgactataatgatttgggtcataggttgggcggttcgccatcgccaagatttcacccgttttaggatccataacaataacgctagcatgtttagcgcctgtatcttccatggctttatcgagagcacgttctgctataaattgaatacttgcatcaatcgttagtgtcacactcttacccttatcaggtaaatatttagatagtacagagccaaagatggcattcccctttctatctgttgcaactagttccttttggataccgcccttcaattcatcatctagcaccatttcaagaccttcaaggcctttatcatcggtaccgacaaagccgagcacttgtgcggccaaattaccattaggataatatcgtttagactcttcaacaaaattaaggccttctaaatttttatcctcaatcaattgggctaccgctttcgacttttctggttccatcatacggtcaatccatacgaacgcagtatcctcttgtaatgatttcacaatgtcctcttttgacatcgtcacatatggtgctataagttcagcaacttcactaggcgattgcttaatcatcttaggatccgcatatagggattttgtaaccacactcatagccagtggtcttccattgcggtcataaatcgtaccgcgcggagattgtaattttctatccacttgcacttggctcaagttcttcgcctgcaaatcagacttatctattatttgtaaaaagaataagcgccccactaatacgacagcaatacacagcaatacgcgtaccgtatattcaattcgcttattatcattccctgaaatattcattatggtctcccactcaatatattacttcgatgatctctgcaacttatggataagcgcttcatataaatcatccggtgtattgttaacgacaccattttgcacctgttgcatcaaatattgtaaccctttcgccacattatcgccacaggcttctagaacgcggttgtcatagttcaaatcttttgtatgtacaggcatttctaggcttaaatcagccatgcattccccgaacgccaatgtaccatcagtaacggaatatggcttaccacaaccaaggacgtcggccgcacaaaccttcgccaattgcaaccatgcttcccgcatactttgactatctctaaactcgccacttcgaatttccttgcgcatccattttttctcatctgcctcttcattttgcacgaagaaatgaaagcgcatgtgatttttaacaatccacgaaacgcgactagcaaatttcttattatagccgagacgaatcaataggtcataggccatctctgcgcctagattatcatggcctcggtcggtgtagcgtccattgataacttgcctaatggtaggcattccctttgccacatcatgtaatagggcgccccaacgaagggttaaatcaggttccgtttctgaaacgacagccaatgtatgataccatccatcaaattcgtgaaacgccttttcttgaggcaatcccaccaaatgatatagctctggcaatataggaacctctttaattgccccattttcaacgacgcggcacgaacattctgccaagcgcgattggacgagtacatctagcccttttgcaactgctggttccaataataaccggtctaattcattgcgcactcgttctagtgaaagccccgatacacggtggaatgcttttggcatggcctctaatagagatttatccggaagaaaatcgagttttgcaacgaatcggcaagctctaaataatcgcagtgcatcctcttggaaccgttccgttggattcccgatggtgcgcaaaaccttatgcttaatatctcggcgcccaccgactaggtcgataacctctttatagcgattcatcgccataccattaacggtaaaatcgcgacgttttacatcttcttcgagcgtatctgcatagatgacttcttcagggcgatggctatctgccccatatcgctccttgcgatacgtagccacttcataatgttttccatctacaatggccactaccacaccgaaggacttacctatgatgcctgtggtttcaatattcgcatcacctaaaacagagatgacctgttcaggtcgggcagatgtaacgatatcaaaatcgtgtggctttacatgcatgagcatatctcgcacagcgccgccaataatgaaagcctcaaagcccgcttcttctaaaattgtcagcaaacgtatagcttgttccatacatctaccctcccttctatttatctttttattgtactacaaatagggttatgaaaaaaggctcacatactataagcacattgcagattatgctcataatagtgaaccttttgtatatatgtaattatagtgaacaaactttctccgctatggcaagacctgtttgagtgacggctaagccaccatcacttgtttcgcgaagggctgcaggcatagcacggccaatattattcatagcctcaattacctcatcggtaggaatttggctctcaataccagctaaagcaagttcagccgctgtaatggcatgaacagcatacacgccattccgtttcacacagggcacctcaacaagacctgccacaggatcacacgcaaggcctagtaaatttttcatacacaatgacacggcatgcccgacctgacgagcagtaccgcccatcatttctacaatggcagctgccgccatacatgcagctgtaccaatctcagcttgacagccaccgaccgcaccggctacacaagcgcgattagcaaccacattccctacgcctgatgcggcaaggaatcctttcaccaagacatctctatctagtttgtattgctcagccacggcttgaatagcgccaggcataacgccacaagaacccgccgttgggcaagccacaattctgaacattttcgcattagcttcgttgaccgcaatagcataagacatcgccttataagcagtttcactcatgaataatggtttccgttccattaaacgagccgcatctccaccagacatattggattgagtccgctgtaaatgacgcataccatcgtgaatggaggcctcaaaaatacttaatcgatgcttaatttctttaacgatttccttttcactacgatcatactgttctagctcactgcgcattaccacatcaccaaaagatatgttattctcttcgctaaggcggataatatcagctatcgtttcatattcgtaactcatcatatcctcctatagggcctcaaaggtcatcacatcttggatgcctgggcattcacgcataaattgtactgtaatagggtttacaacggaatctgtggtaatcaccataaccgcgtccttgtatttaccctttctaaacacgcgcatggacgcaatgttgatatccgattcactcaaggcctgactaatgagagaaattgcacctggtctatcctcatggaatacaacaagggtaaattcatcgcccgtaatggacatatcattgccatcaacctcggtgatcatgatttgacctccaccaatcgaacgacctacaacggacatatgacgattatggtcgccgtataaatcaaacttaactacattcggatgtcctatatcgagtggtgattcgatgaaagtatagtctaaacctgcttcatcagcgagttccttcgcattgcggatgcgtttatcatcctctttaaagcctaataaaccacctaataaggcacgatctgtaccatgccctttatatgtttttgcaaatgacccatacaaggtcatttcaaccttcttcggcgtattcccaaatatacaacgagccatcttgccaagccgtgctgcaccagcggtatgcgaactagatgggccaatcataacagggccgataatatcaaaaatactgttcataatgaacctctatgcatatataaataaagatataatctaattcttatctatagtatagcaatcaatatcgaggcttgtctatatgcacaatagaggtatgtttgtccacttatgacaaacatacctctattccattaattaactattaatataactcaaccaagaaaataatcgcaaatccccacagtacaagaccatatgtcgtatttatttttacgacaaaaaaggctataccatccgaagatggcatagcctaatttatatagcaacaacccgaatcatataagagagaggggattagggccgctgttatcaggttttaatccgattagcccaagatagctttcatatcagcttctggagttgtaattggatgtaattggaatttttctaccaaaatgttcaatacattgctggagaagaatttaggcaaggaaggtccgatgtagatgttgcggatacccaatgccaacaatgttaacaagatacatactgctttttgttcgtaccaggacaataccaatgttaatggcaagtcgtttacgtcacattcaaatgcaccagccaaagctactgctacttgaatagcggagtaagcatcgttacattgacccatatcaaggatacgagggataccaccgatttcaccgatgttaaggtcgttgaagcggaatttaccacaagccaatgtcaatactacagtatcatctggagtttgttttacgaattctgtgtagtagttacggcctactttagcaccgtcacaaccaccaactaagaagaagtgtttgattgcgccagcttttacagcgtcgattactttatcagcaatacccaatactgtaccgtgaccgaaaccagtagttacttcgtgaccaccgttgatgccagtgaattcttgagcttctttgtaaccgcccaattcgatagcgcgttcaataacagcggagaagtctttagtgccatcagctttttcttctacgtgtgcacagccgtcgaaacctaccatatctgtagtgaagatattagctctgtagttttcttttggtggcataatgcagtttgtagtgaacaagaatgcgccaggaacgtcaacgaattctttttgttggttttgccatgcagtaccgaagttacctttcaattgaggatgttttttcaattcagggtaagcgtggcaaggtaacatttcaccatgagtatagatgtttacacctttaccatcagtttgttccaacaattgattcaagtcgtgaaggtcatgaccagttacaacaatgaaaggacctggttctacagtcaaaggtactgtagttggtactggagtaccatatgtttcagtgttagctttatcaagaatagccatgcatttcaagttgatttgaccgaattccatcaacaagttcaaccattcttcagcactgtggtctttagcgagttctactaggcctttgatgaaccaagcatcaacttcaggatcatggaaaccaaggcgtgcagcatgccatgcatacgcagccataccacgcatacctaacaataatgtggaacgaagggatacgatatcttcttcacctttccacaattgttcccaatcgaagttttgagctgcactatcaatttttgcatgataagcgtttacttcgtcgatgaattcttgaacgcggtcttcagagaagtttacgtttgttacacacatgaacaaaccgcgcattaaatagtcaacgccttctttagtttggccttttacgtctaaagcgcgtgctaaaccaactaaagcagcagttaattcgtcttgtaaattagcaactggtgcagttttaccacatacaccttgtacagtacagccgcctggtgctgcagattgttcgcattgataacagaacatgctcatttaaaaatcctcctttgcgagacttcctcgcattcaagctagataatataaaacctatacattacactgatgaattatcaggtgtctgattgattacattgaaagtataacgtaaaggtgatacaatttctgtagcttgagcaacaataaaaaaactttttcaaaaatttcctgactcttcttttggaacaggctgctcacaagagcatatataattattttacaatactcattacaaattacctataaaaagcatcacaccatacgatgtataattcgggctaaaatagctatatactatattaggaggtacacatgattaaacaagttctatccgatgacattatcaaacaatacttaccaattttaacagcttgccccctattcaacacattgggtataccagaattaacgagctacttacataatgcaaaagtaattgtaaagaattataaaaagaacgactttatcgctatttcaggagatcctatggaaggaattggcgttatcttggaaggcagtgctcttcttacgcgtgaaaatgtgctaggccaacgagttatcatggccaatttagaggcatcctctatttttggggaagccttgctatttagtaagcatccactttggccagccaccataaaagcattaaagccaacaaaaattatgtttataccactcgaaacatttatcgaaacattacctgactgccaacaatgccaaacgaaaattctatccaatcttttagaggacttatccgaaaaagcattgcttctaaccaaaaaagttcattatttaacattaaagggcatgcgtgaaaaaatttacgcatatcttacagatatatacacgatgcaacacagtgaaaaactggtgttacctcataatcgcgaacaaatggcggaggctctcaacgtttcacgtactgcgttaagccgtgagcttggaagattgcgcgacgagggtatcattgaaatcaacggccgccatgtgacattattagaccctcaacaaattgtagaatttggatttaacaattaaatacagcgtgcacgcaacacaaaaccgcctaggcatagccttaggcggtttattgtatatatgtatgaattagaaccaatgagataaatcaaattcttccccaatggttgctttcacatgagctcgacctaaatagagaccaagtaatgtaagagaaatagaacacataggactttcatcatagacgcgagccaaatcagaaagaaccggactaatatcgtccatgatttgacgagcctcttcccctctaaatgcagtaggtttactcttcatcaaagctatgagatcacgttgcaccattggatcagagatgcgagcctctctaaagaagcgttgtgccaaggattcatcgacgacagccaatttataaagattagagtttaggctgcgcaccacaaatcgtggatctacgccgcggccatcagtagcacggaataactcttcctttgtaaagccacgatagttaaatacaaacggataggaattactcaataattgcgtcaatgttacggactcacgttcttgctgagtacaacgtaaataatctagctgacgataaaacgatgagtcatgaggcaaatccgaaataaatggttcgatatatttttccacataatgttggaaatgaatacgtccatagttattagaattacgagagtattgtaataataatgttaacgccatcacttgaaagtgtcctaatgtaagatggggcaaaacgcgcaatgcatcaaaagctactaagtacggtgtactcgacttaggcgattgaaccacatcggaaaaggcttctagcgcagctgttttcatccaagtcgttggagatcctgcataggctttttgcatagccaataatgcttcttgaattacgatattttgcaatagtaatttgacttcgcttaatttcgtaatgcctaaaacggctaatgcatcccgcgtaatatctgcaacgaattgcatagcatcaccatgaacgacaccgaaagcatgagcaaatggttcaattgcaagggctacgcgtttatcctcttgtgcagcctgtgcccatggaccaattggttctggctcatcctcttctttgatggataaatgttcattaatttcatcggcattaaacatgcgtgtttcttctaatgcagatggaccttgtggatttacaacttcactattttcactgccaaacatctgcgttgcatcagcatcaaagcatcgtgtttcgtccattacatcaggagactcacctaatgcaatagtatcctctgtagaagattcaacagcaggaatttccatcgttttttctgtatcagtcactgcatcaataggtgctgcaacaacgggttctgtaacaataggttctgcggtaacagaattctcaaaatcatgttgttctacaggattatgtaattgaatagcacccttactaacagatgttcgttcatcaacatgagcctcgtatacatcaacaccatcatgtgtttcccgaggtgttatatgtaccttctcttgttcatacaaacgccctggacgtgatgtttttgaaggctttgatattacggaatgcgcttcactgttactttcacttttattaaataccgcatagcatactccaaagaaaccaagtacgacaacggccaatacgacatatgggataaacgttgacattacattctcctcttataataatgcgtcattatataccgcacggataccgccgatactcttagggcgaacacgacaagctgtcacatgagcttccccaatttcttttaagcttaatcgtacaggaaccgttacatgtttcatatgcataccaatgaaagtatcgcctatatcgattcccgcatctgcttgtataaattcaacaattacaggatccttaaagcggttatacgcagtcatagccatagcgccaccagcatgcaattgaggaacaacattacattcctcttcccaagtcatagcctcacgttccattacaagggctctatttaaatgttcacaacattgtacagcaagatataaacctcgttcgctaacggctttataaatctcatcaaatacaacagctgctacatcctcatgagaatcagtgccaatctttttaccacaaatctcacttgtagaacatcccactacaaatagctgtccttcgtgtacctttgctactgttaagagttcttccatagcagtatgtacttcttgtctaattgtttcaatagaatgcatgatatcgcccctttttaatattcaaatctataaatatattatcataaattatatgtcttttatagaccaaactataggacatatgcgtgaaattcttatgataaattaatctattgtatatgttactagtttgaaatacaaaaaagaggctcgctaaagcaagcctcttccaatcactcagtggtgatattagatttttctgtaaggtttttggccttgttcgtagaagttgttaccttcagtatcgccaactacgatacaagggaaatcttcaactgtcaattcagccaaagcttctggaccaagttcaccataagcaagtacttcgtattttttgatggattttgcaatcaatgctgcagcgccaccaactgctgcgaagtatgtgcaaccatttttcttcatggattcaactacttctggtttacgggaacctttaccaatcatgcctttgataccttggtcaagcattgttggtgtgtaagcatccatacgaccggaagttgtaggaccagcggaaccaattggatcaccaggttttgcaggtgttggtccaagataataaacgaatttatttgtccagtcgattggtaatttttcaccacgcgctaaagcttcagtcataactttatgagcagcgtcacgagcggagtaaattttaccagtgataagaacgctatcaccaacttttaatttgcgggaaaactcttcattatattcttcagtattaatgcgaattgattcagccattgtttttacctcctatcgattaaagtactacgtgagcatgacgagcagcatggcacatgatagtaactgcaacaggaagacctgcgatgtgagttgcaccccattcgatgtttacaccgatacaagttgtagtgccacccaattgtggtccaataccagttttgttaaccatttccatgatttcttcttctaattttgcatagtctgcatctttatgaggtacgctaatgtcacgaagcaacgcttttttggacataacagctgcttggtccatagtaccaccaataccaacgccaagtacgattggagggcatgggttagggccagcatgttttacgatttcaagaactgcatttttaacgccttcaacgccatctgcaggtaccaacatagctacgtcagatttattttcagaaccgaaacctttaagttctacgttgatttctactttatcgccaggaacgatatcgatgtagatgattgcaggtgtgttgttttgagtgtttttacggttgaacaatggttctgctacaacggatttacgaaggtaaccttctacataaccttgagcaacaccttcattgatagcttctttaagatcgccaccaacaaaatgaacatcttgacctacttctacgaatactaatgtcataccagtatcttggcagtatggacgatcttcagcatcagcaatttctgcatttttgatgatttgatcgagaacgatgcaaccaactggagactcttctgtttcacggccttttttcaagccttcatagatgtcttttggcaagtggtaagctgcgtccatacacatttgacggactgtttttgtgatttcagatacttgaatctcgcgcaagataatccctcctcaggaaaataattagatattaactctaatacaatgagatacatttattctcaaagtgttaagctaagattaactctatgactccatactagcacactaccgaaggcctttcaacgctttacctatacagttttctcaatgaaatttatcgatttgataattattttcaatgattaattataccttttttatgcactttgataatattaaaaatagtagcttaactccaataaaaggctatataactgtaataaatatcacattatattattgtatatggttcgtttccaatcaatatgtgttctaaccataaaatatattgctttctttaatgagattatctatcatttttatataaaaagattttaattatgagtatgtataacgattatcttcaatacaattaatttactaactcccctattcatcaaggagttcatatacacaaaaacacgcttaattagtggatttctcaccaatatatataattatcgttttttatgactatctcatcaaattattttatcattcctcaagctctgtctattatgtgttttagttatagcatatgctaaaaatttttaactttttataacatttccccttgctattatcgatatgttcctttataataatcactatattattcctcgatagctcagttggtagagcaatcggctgttaaccgatcggtcgtaggttcgagtcctactcggggagccaatattggcccgttggtcaagcggttaagacaccgccctttcacggcggtatcccgggttcgattcccggacgggtcaccacatggacgattagctcagctgggagagcgcctgccttacaagcaggatgtcggcagttcgatcctgtcatcgtccaccacagtaagaagcaagctgacgcttgcttcttttttattgcaactatggtatactgtaagatatagttttgattatatttatatcaaggagagtcgaatatgaactttagagaagcaaccatgcgtatcagtttttgtctcgccttagcatttgtttcaactttcacaatcgctaatgcagcaaatgtagatgctcaaactacaaaagcccgttctattcctattgcgccagtaaagatcatccctgatcctggcactatcaaaacgtcgccgattcaaattacttcgaccacgtcaaatacaccatctacagtgggaaaggctaactacgatggccatttagacaatttcccatctcgcaaggtaacacttgtagtaccaacaacattgcgcaatgaaaatacggctgcctttggtaaatatttatccgattcagtggcaaatgtcttgcgctatccatactatgatacaactgtagtaagcaccaacacaccattagcacaaatcacagccgttgatttagccgaagtagcagcatcacaacattccgaaattgtcattatgcctgtgccaatgcaagacatatatgtacaattaccaacgtcctatctcagccaatactatcatgatgatagcgacgacattcacattcaagctaaagtatctgctatgatttatttctacgatactaatgaaggtatcgttcacactatccgtagtggttttaaccaaatcgatgataccttgactatgccaacacataaatccatatggaataaagtcataaaagacttacttgaacaattaccatataaacgtgttccaacagatcgagatcgttatcaagctcctggtattaatgcagaaatgccagttgttccagactatgaatttcaagtagaacaaccaaaaagtacagcttactctctaaaaggtgttagtgtattataattcaaaacaatgcaacagcaaaagggtgtcacccacatgggtgacaccctttttgcgtatacaagcaaataaggagtactacaagagtactccttatttaccaaggctatatcaatgtataactactatatgcgttgtgttacctttaaacgaagtaatgcccgagctaaggcgagttcagcacgctctacatctatatcaggtgtagggttagacaaacggccttcagcgcgttcttttgctcgtttcgcgcgatcgatatcgatggtttctgggctttcacaattaggtgttacaatgctcaccttgttgtgttcaatttcaacaaagcccccgaaaacagcaaatgtatgctgttgtccatcaggattatcgacacgtaaaggggctatatctagggcaataatcataggtgcatgattaggcaatacaccaaattcgccatcaatagcatgccctacgaaaaagtcagccttaccatcatatacaatcgcatcaggtgttattatcgttagggtcataggttccgccatggattattcccccttctcttgcatttcctttgcttttgcaacggcttcatcaatggtaccaaccatatagaatgcgccttctggtaaatcatcatgtttaccatcaaggatttctttaaagccacgcaatgtttcttgtaatggtacatatttaccaggagaaccggtaaatacttctgctacgaagaatggttgacttaagaaacgttgaattttacgagctcgagatacagttaacttatcttcatcagataattcttccatacctagaattgcgatgatatcttgtaagtcgcgatatttttgcaacacttcttgaacgccacgagccacgttataatgttcatccccaagtacatgagggtccaaaatacggcttgtagaatcaagtggatctacggcaggataaataccaagttccgcgatggaacgagacaatactgttgttgcatccaagtgagcaaatgtagctgctggtgcagggtcagtcaagtcatcggcaggtacgtatacggcttgtacagacgtaatggaaccttcttttgtagatgtaatacgttcttgtaaggcacctacgtcatttgccaatgtaggttgataacctacagcagatggcatacgacctaaaagagcagatacttcggaaccagcttgaataaaacggaagatgttatcgataaacaagagcacgtcttgtttcttcacatcacggaaatattcagccattgtaagacctgtcaaaccaacgcgcatacgagcccctggtggctcattcatttgtccatataccaaggctgttttattaataacgccggattccttcatttcgttccaaaggtcattaccttcacgagtacgttcacctacgccagagaatacggaatagccaccatgttctgtggcaacattgtgaatcaattccataatcaatacagttttccctacgccggcaccgccgaacaaaccgattttaccaccttttacgtatggtgcgatcaagtctacgactttgatacccgtttcaagaatttgtgtatctggtgaaaggtcatcaaatttaggtgctggacgatggataggccacatttcatctgctactacaggagctgaatcatggtctacggtttcacccaacacattaaagatacgacccaatacgccttcaccaaccggtacggagattgcagcaccagtgtcttctgcttccataccacgggtcataccatcagtagaactcatagcaacgcaacgaaccatatcgtcccctaagtgttgcataacttctactacaattttttgtctatcgtgcgctttatggtcatggtagatgtgaatggcgttatagatagctggtaaatgaccagcttcaaaacgcacgtctacaactgggccgatgacctgcaccactttcccaatattattactcattaagaggtctctccttatctattgcaaggcattggcaccgccaacaatttcagaaatttcattcgtaatactggattgacgtaatttattatattcaagccctaaggaactgatgagatccccagcattatcagtagcagatgtcatagctgtcatacgagcacctaattcacttgccgccgcttgtaataatccattatatacggtaatttctaaatattttggtaataatgcatccagaactgctgcagggtccggcataaattcatactcttcgccctttacttcatcatctggttgctctaacggtagaatgcactctgcctgtgcaatttgcgtcatagaatttacaaagcgcgtataaatcatgataacttcgtcaacttcatgacgttcatataatgaaagtgcatgatccataatatgtcgcgcatgttcgtaactcggtttatcggaaaaaccactgtacgattgatcaatatgatagtgacgagattttaaactatcctttggttttcgcccagctgtaatgaggcaatattcatcaggtgttttttgaccgatttgttctattgccaattttaatacgttagacgaataggcgcctgcaaggcccttgtcagcaccgataacgatataacaagtccgttttacaggtctactttcaagtagaggacttacataatctcgtaaatcactagtggagatatgacgcaagatttgccctattttttctgcgtatggccgcgttgcatcagcttttgcttgagccctacgaagacgagcagaagctaccatcttcatcgcttttgttatttgttgcgtattagtaacactctttatacgctttcgcaaatcttgtgcactagccatacattacgcctccttacgggaaactaatgtatgtgtagcaccaaaggcttctacacattctggaatagcttgttttaacaagttttctgttgcttcatcaagtttatttgtgctttcaatattgctgataatttcaggataatttgcacgaataaaacgtaataattccgcttcaaatgccaatacatcagctacttgaatgctagctaagtatcccttagtaccagcatataggttaataaccatttcagctacactcattggctcatattgaccttgtttcaacatttcagtcaatcgttcaccacggtctaattgtgcttttgtggctgcatcaagatcagaaccgaactgagcaaatgctgctaattcacgatattgtgcaaggtccaaacgcaattgaccagctacttgtttcatcgctttagtttgcgcactaccacctacacgagatacggacaaacctacgtcaacagcaggacgaataccggagtagaacatatctgtgcccaagaaaatttgaccatcagtaatggaaattacgtttgttgggatataagcagatacgtcaccagcttgcgtttcaatgattggcaacgctgtaatagagccgccaccaagttctggtgaaagtttagcagcacgttccaatagacggctatgtaagtagaatacgtcccctggatacgcttcacgccctggtggacgacgtaataatagagacatagcgcgatatgcagccgcttgttttgttaaatcatcatatacgcagagtacatgttttcctttgtacataaagtattcgcccattgcaacacctgcatatggagcaatgtattgaagtggagcgcctgtggaagcactcgcagaaacgacgattgtgtaatccaatgcgcctgtttcttctaatttttgtactacacgagctacggtagattctttttgaccaatcgctacatagatacaaattacatctttccccttttggttgatgattgtatcaagagcaattgcagttttacctgtaccacggtcaccaatgataagctcacgttgaccacgaccaattggtaccatcgcatcgatagctttcaaacctgtttgcaaaggttcgtttacagattgacgatccgcaataccaggtgctggatgttctacaggacgacgttctgtcgcttgaatagcacccttgccatcgataggttgccccaacggattaactacgcgaccaataagggcatcccctactggtacgtccatgattttgccggtacggcgtacttcatcgccttctttaatcaagaagtcgtcaccaagtagtacggcaccaacattgtctaattctaagttcaaaaccaggccatatacgccgtgtggtaattctaacaattcaccggccatggctctttcaagaccataaatatgggcgatgccatcccctacgtcgaggacagtacccacgtcatcgacattaaggtcaacatcatagtcctgaatctgctgtttgattatagcagtgatttcttcaggcttcattttcatatatacccattcaccccaatctaatagagtcagttcgtactaacgtttttttcaattcgtctaagcgacgtgcaatcgatccatcaatgcgtttatcaccgatttgaatgataataccacccatgattctagggtcttgacgcaccgatacaatgacatccttgccggtcatcgcttgtaatttagcttgtacatcatcacgcaatgtatcagttaatggttctgctacagttacaattgcttctaaaatacctcgtgcttcgcgagatttttttatgaaagctctaattgtatcttgcaaataacgatatctgccacgtttaaccatgacatacatgaaatgaagtactgtcttttctacagcagtgccaaagacctttccaagtagagaaatctttgcatctgcttccacaataggattattaataaaccctaccaattctggttgttcattaagaacagaggccacatataaaagattttcttctgtagttactaaattaccttgttcttgagctagctctaacatagctgaactgtatttatctgctacaatttctgtgctcataatatcacaaccctatcgttttactatcaagtttcgcaatagcgtcttcaattaattttgtattagtttcgctgtccatatcttttgccacaaccttagtcgccattgcaacagataaggaaataacttcgttacgcaaattattcatagcacgatcacgttcgtttacgatatcttggcgagctcgttctttttcacgttcgatttgttcacgagccgttgccaattgttcacgcgtagtcgcttctgcttgttgcactgctttttcaacgatttgttgagcctcttggcgagcatttgcaatttgcgcagcgtagtcagctttgaattgttccgcttcattacgagcagcttgagcatctgctaagtccttagcaatgcgttctttacgctcttgcatcatagaaaccaatggtttatatgcaaaacgggccaaaatccaaactaatataaaaaagtttagcatttgagcaagaattgtccctagcgttaaatctaccaaggtcgttcctcctcgctattatctgaacaataaaatgaaagcaactactacgccgatgataggcatagcttcgattaagccgatagctacgaacattgtggacattaattgaccgcgcaattcaggttgacgtgtaataccttcaataactttactagctaccatgccgtcaccaatacctgccgcgatagcaccacaacctactgcgattgccgcagctaatgcgaataaaccttgaacttccataataaatcctccattaaaattagtgttcttcacttaatgccatacctaaatagttggctgttagaactgtaaaaataaaagcttgaataataccaataaataaactaaaagcaatccaaacccatggtacaggtacgaaccaaggcaaattataaaggatttccaataaaatttcgccagctacaatattaccaaatagacggaaagctaatgtgataggttttgctatttcttcaaatatgtttagaactagcatagccttataaggctgtaagaaatgattaaaataagataagccttttactttaatccccattccccaaactataaagctactgcacaatgcgagtgctgctgttgtattaatatccgccgtaggcgaagtaacagcatgtagcgttggcaataaaccaagctcattaccaacaaagataaataagaagaatgtgaataacaatgaactcaccatcggccagtgtttcccaagcgttggcgataattgaccttctaatgcttccaatatagtttccactacattttgaacacccgaaggcactaatgctcgatttcgcgtagcaagcacggaaatgatgatgacgatcgccatcgtaatccacgtagcaattaatgtatcgatgttaaacgataaacctagccactgtactacttgatggtgacccgcatgcagttccacagactcaacccctttctcacgtagcaatataaattttatatatatccatataatatatatctatgtattatcatacctctttataggtatataatcaacacttctggagtaaacaattcgtgatttacatattaaaaatgcattttatgcattcaaaattcataataggaatgtaattaatccttatttcatgcgatttagtcctatcgcccaatgcaataaattttattacttactcaatcgccaaaacacgatatacaatacaggctgtataagtacaactgaaatcaataaactttcagctcggacaccaggtatttgcaatcctatgactacaaaggcgccaatcagagccaatcgccacatcatttgacgtcgcgctttagctacagcctggtgtggattgccatatgctagccctttattatgtagacctaacagtactaaataaaccatcatagtcaacatgccccataaccaaccgagcacgtactgattccagcccacaatatattggacaagtaggcctaaaaaggtaacaaaaaaacaggcccatagtacatgacgtatgaatttaatatattgattcataaatacctcactatttaacctgtttatataacatataaaagcctgttagggcaccgattaatccaagaataaccatgcataatggcatggtatccatccatgtatccagtttatatcctatccagataaatccaccgatacaaaatagaagggtcagccctgccgatgtagccatcgccagagctttcaccatatccttgtccatattatttaccaaatcgttctggtcgattagcatcgcctaagaactcgtgacgcaacgcttgtaaaatacgttcagatgctttgccatcaccataagggttaacggaatttgacattgtcttataggctgcttcactgtgtaatagctcataagcagcttcatataccgcgtctttatcagtacctacaaggcgaactgtaccagcatctacagcctctggtcgttcagtagtatcgcgcaatacgagaactggtttaccaagagcaggagcctcttcttgaatcccaccagaatctgtaagaattaagtaagacttagccatcaagtttgcaaacggttcataatctagaggatcgatgagcgttacgcgatccacctcgcctaattcctcttgaaccacttgacgaaccttagggtttttatgcactgggaataccacttgaatatcgtcaaaatcattcaataaatcacgaatggattgatacacatggcgcataggttcaccaaggttttcacgacgatgtgtggtaacaagaactgtacgcttattgggatcgagtgcattaatagccgcatcatcaaagacataattatcttttacagttgtatctagtgcatcaattacagtattaccagtaacataaaggtgatcagtattaatattttctcgttttaaattcgcttcagaactagcggtaggtgcaaaatgatatgttgccaaggaacctgttaatttgcggttcatctcttctggaaatggagagtaaatatcgcctgtacgaaggcctgcctccacatgacctactgggatttcttggtaaaaggatgccaacgcacctgcaaaggttgttgtcgtatcaccatgaacgagtactacatcaggttttgcttcttctaaaacggattttaatcccatcaatgcacgatttgtcacatcgtacaacgtttgaccttggctcatgatattcaaatcataatcaggcgtaatgtcaaacaggcgcaacacttggtcgagcatatctctatgttgtgctgttacagttacaattggctccatatctggtgccgcttctaaggcttttactagcggagccattttgattgcctctggtcttgtaccaaagatagtcattactttcaacatttactcatcctccacagagtctaataaaaaaggggcgcattgcgcccctacattggttactcttttttagagtcatcatctgcatgctctaatgcttttgccaattctttgcgatcaaacgaaatagtttcatctaaattgctacgttcaattgtagggcgaggtaagggatgtcccgccgcatcactatgtgtaataacacccaagcgacgagccacatagatactacataggaaaatggctaagactagtacgcaaccaatccaagcattaacctctgcaacgataaccgaaacaccaccgaagagagcagtaacggcatacatcatcaatactgcttgtttttgagataagccttgtgccaataaacgatggtgtacatgacctttatctggtttaaagataggtcgtccactaatcttacgacgtacgatagcaaacaatgtatctaatataggtaaaccaagaacgatagctggaacaactaaagcaatggtagctgccgttttcacggcccccataacagatatagctgctaaggtatagccgaggagcatcgaaccggtatcccccatgaatatcttggcgggattaaaattgtaccgcaagaaacctaccgtcgcacctgcaagagccaatgcgatacaagctaaatcaatttgacctaattgtaatgtcatcgcacatacggcaatacaagcgataaaggaaatccctgctgccaagccatcaagcccatcgattagattgacaatattggtaaatcctacaatccagaatatggtcaacggaatggcccaatactttaaataaactacaccaccccaaggaagattgataaaatctacgcgaatatcataggccacaagaatggcggcagcaataatttgccccatcaatttcgtcttcggttcaatttgtcggatatcgtcccaaataccaacaaggactaaaattacagtacccaatacgaacccgaataatttatggtcatgaggaatactattgttaaataacacagatcctatataaccaaggaaaatagccaatccaccaagacggggaatagcaccatgatgcactttacgagcatcaggtttatcaatggcccctacggcaacagcaaatcgcttaaccaagggggttagtgcaaaggttatgacgagagccaacacaaaggcccacacataatcaggcacatactcactcataagtacacctccaacaactcgaattcaacagattcgaggtttcaacttagtttgttaagctgcgaataggtgctggaatacgaccgccacgagcaataaactcagctgcgctgtatggacttacttcaataattggagcatagccaagaaggccgccaaattcaacaacttcaccaactgttttaccaggaactgggataacgcggactgctgttgttttattattaatcatgccgatagcagattcgtcggcgatgatagcagaaattgtatctgctgttgtgtcgccaggaatagcaatcatatcgagacctacggaacatacacaagtcatagcttctaatttatcaagggatagactaccgcaagatacagcatcaatcatgcctgcatcttcagaaaccggaatgaaagcaccacttaaaccgcctacgtgagaggatgccataagaccaccttttttcaccgcatcgtttaacaatgctaatgctgctgtagtgccatgacaaccacaagaagataagcccatttcttcaagtacatgagctacggagtcacctactgcaggcgttggtgccaaggacaagtcgatgataccaaatggtttaccaaggcgacgagatgcctcttgtgctaccaattgaccaacacgtgtaattttgaacgccgtacgtttaatagtttcggccacaacgtcaaatggttcaccacgcactgcttcaagagcatgttttacaacacctgggccagatacacctacggaaatagcgctatcaccttcggttacaccgaagaaagcacctgccataaatggattatcttctacaggattacagaaaataacgagcttagcacaaccaagtgcatcattatctttagtaaggtcagccgtctttttaacgataatacccatatcacgaactgcatccatgttgatacctgttttagtggaaccaacaccaacagaactacaaacgatgtctgttgtggctaacgcttcaggaatagaatcgataagaatacggtcagctttagtctcaccttttgtaacgagtgcagaaaaaccaccgataaaattaacacccacagttttggctgcgcggtcaagcgcttctgcaattggtacataagatcttaaatcactgccaccagccactaaggaaatcggtgttacagaaatacgtttattgatgataggcacaccaaattcacgctcaatgtcctcaccggttttaaccaaatgttcagcttcttttgtaatacggtcataaatgcgattgcagagttctttaccagagctagatgcacattctaacaagctaatgcccattgtaatggtacgcacatcgagcttgttatcatgaatcatctgattcgtttcaagaatattgtcaatagataacatgtgcgcctccctatcctacgcggtgcatactaaggaaaatatcagcatgttgcgcacgaatttctacgcctaatgtattacctagttcggataaagcatcttgaatagatgttaaatcttttacgtcgttagtttcggtttcacacatcataatcatattaaacaaaccatctagaatcgtctgattaatagataagatatttactttatggtctgccaaaatactgctgacaccagcaatgatacctacacggtcgacaccaactacggtaactactaatttcatacaatcaccttttctgactcactacaaactatgtacatgaaaattcattcattctataaactatattaatatattatatcacatatatcatattaagagcgtgaaaactttatgagaatgctcattcagtctctatggtgccatttaatgcagcattgacaatttcctcacctgcagtgagtagtgccacaagacctaaatcgcctttgtaactttcaccataaattttgtataaatcttctgtaccagatggtctagctacgaaccaccctttatcagtttctacgcgtacaccatcgattggcatatcattatacaatgatgtggtacgaatattcatgatgggatcaccatcaacagtagtggcagtaattaattcagcactcatttgttttaggatttgtttttgctcttttttgcatggtgcatcaatacggccaaaacttggatttccaaactcctcaacaaattcgtcagccatttttagtgcagattttcccataacggccatgatttccatacttaacaaagccataatcataccatctttatcggtagtccaaacagtgccatcctttttcaagaaggaagcgcccgcactttcttcaccacctatgccaatggctccatcaaataaaagctgtgaaaaatatttaaaacccacaggtacttcaaacacaggagtttcagcatcagcagcccatttatcaatcatcgtagtgcatacaacagtcttaccaacacccttatttttccatccgcgcgtggtaaataaatagcgagctgctaatgttaaaaatgtattagccgatataagcccactggacacgacaatgccatagcgatcataatcaggatcattaccaactgctaaatcaaaatccccgattcgattaataaccgaagccatcacataagtggaagaacagtccatacgaactttgccatcatggtcataggtcataaaactaaaagtcggatcataatcatcatgaatgatagttaaatcaagatcatatcgttccttgatagcattccaatagctggcaccgctaccacctaatgtgtccaccaatacctttggaccggccgctttaatggcctccatattaataacatcgcctaattcttccacatataagcctttatagtcatatggcacttgtgcagtaggttcgatattatctatgctaatgcgcttaaagtcctcgctttcacaataggcagtcaaatactcgttggcacgcatctcaatccattttgtcaccaccgtatcagcaggaccaccgataatcgtattatatttaatgcccccattatcaggcgggttgtgagacggtgtaataatgataccgtccgccttatcgtcatgttcttcattgtatcgaataatagcgcgtgatacagaaggtgttgggacgaaagccatatcacaatctaccatagctgtaacgccattaccagctaatacctcaagcacggtcacaagtgcgggctgagataatgcatgcgtatcttggcctacgaatataggaccagtagcaccaaattgtttacgaccatcacaaatggcttgtgtaatagccgccacatgaaggtctgtaaatgtaccatctacggaggtaccacgatggccagatgtaccgaatgaaaccaattgtgtaggatttgtcatatctggaacattatcaaagtacgcatctacaatggtctgtacatctataatatcttgttcttgaacaggttttcctgctaatgcatgagccatgctagcctccttattctaatctttgtgttctacataatgagcattatccttacattctttgacgagattttctatcgacgtcggcacaacaggtgtagtgaatcctttgccgataacctcttgtgcatctgtgatgagaatgaaagcctcattatccacttcttctataacttcttttaatttattgacttgcagcaaattaaccgctaccattacaatctgtttcggcgttctagtataagcaccgataccattgataatcgtcgcaccacggccaaccttactaatgaccgcatcacagacctcataggttcgataagtaatgatgaaagctacctttcgttgattaaaaccaatgacgaccttattggtaataatcgtatatacatacaacgatacgagtgtaaccgctacagcttctaagccaaccacaaatacagcagctgctaagatagcagcattgatgacactattaatggatcccatttgaagtccgtagtattttcggacgatcaatgctatcggatcaagtccacccgtattaccgccaacacgatataccataccgaggcctacccccgttgtaacaccagccatcatagaactcaacaatggatcagaaatgaccatattgtattgcaagaaatcaaaggcatctaccatccaggacaacatgacggtaccgtacaaggtattgaccaccacgcgcttgcctagccaatgccaagccgcccaaaatataggaatgtttaaaatcacattccatgtaccaacggaaagtcctgtgatgtaatagagtataagaccaataccactaattccggtgctcaccaatttgtgcggtaacacaaacgcatcaaggccagcgccaaaaatagcacagcctatggcaacgattatacattggtatacatcatctttatatttagaccacatataggcctccctaaattgccatttcactataaatattctataattaattaattgaatatatagcattatcactatatatttacatacatatacagtttcatcataaactacttaatgtttattttcaatcatttttaatctcatgtacgaatggcatagaaatttgtacaaatcatatgtcgcatcgaggattttatgtcaaaaagtatcgaacaattaggtcatagtaaaatcaatatcggccttgctattactggtaaacgcgatgacggttatcacaatattgacagtatattccagtctattcgtttggcggactccatctactttgccaaacatcattccgttgtattctccggtgtagcaccagagttaccacaatacattcaagatctcatcccctatgatgaacgcaatttagcattaaaagcattgcgcgaagtacaaaagtatacaggatgtaaggcaggcgccgctattcacctcatgaaacgcgtacccgcggcggcaggtcttggcggtggcagcgcagatgcagcagcgatgctactaggcctcaataagttttgggatttgcgcctcaccatggatgagttgatgacattaggtgctaaactcggctccgatgtaccattcttattaaaaggtggcacggctcgtggtacaggtcgcggcgaaaaactcgtctatcatccatcacctgaacctcattggctattattggtaaaacctgaaatttctgtatccactgcagtagcctacggtcgttataacggtcagtccaacgccacatcagatacaattactaatgtattacaccatttagaacaaaatgatatgtatggggctttcacaaatagcgctaatacatttgaagaattattattccctgatcacgacgaactgattacgtgtaaagagttctttacgagccgtgactatccaaccatcatgaccggcagtggccctaccatggttgtgttgttagaaaaaccggctcaagcattgtccttacaagaagaaatcaaaaaagctggtcataactggctttcactaattacaaaaacctgcacacaggaggaggtacaatgacaaaacgattgcaacctatacgtctagatgcctataaaccattaagcgaagtagtgagtgaaacattacgctcagccattcaggacggcacccttaaaccgggcgagcgcctcatggaaattcctctcgccgaagaactcggtgtgagcagaactcctatccgcgaagccattcgcaaactcgaacttgagggattcgtcgtaatggttccacgtcgcggtacctatgtagcaaatatttcgttaaaggatattacccaagtattcgaaatccgttccgcccttgaagaattagctgctggccttgcagcagagcgcattacaagcgatgaaatagaaatgctagagcgcatgctcgtggaaatcggcgatcacatggaaaacaaagatatggatagtgtagtagccgcagacgtagcatttcacgaggtcctctacaaggcttcccgtaacgaacgcttagcagacatcgtccacaacttgcgcgaacaaacataccgattccgcagcttttccatgaaccaaccaggccggttacgcaaaacgtgggaagagcatcgcctcttggtcgaagccatcgcatcccataacgcggtacaagctcgtaaactagcgcgtatccacatggaacattctgaacaaaccttattacaaggcatggaggatgccaagtcctttagtacagaggatatataatactagaacctcctagatgactgcatactacacgcatacatagatataaattgtatttatgtatgcgtgtttgttatattctatagaagaatatttcattttttggtacaatagatacaaattttatagtgttattaaagaaaggtgagttttatggaagctctactcaatgatgcagtctccacggtcaatacctacctgtggaactacttgatcatctttattctcatcggtgctggtctcttctttacgatgaccactggtgccgtccaaattcgcatgtttaaggaaatggttcgccttgtcgcttctggcgcaggttctaaaacagaaaagaaccatgtatcctcattccaagcattctgcgttagtaccgcatctcgcgtaggtgttggtaacatcgctggtatcgctatcgccgttgtactcggtggtcctggtgccgtgttctggatgtgggttatcgcccttatcggtgctgctactggctttattgaaagtacactcgctcaaatttacaaggaacctgttgccaaaggcggtttctacggtggtcctgcctactatatccgctatggtcttaacaacaaattcctagctgttttattcgctattttaatcagcattacctatggttggatttacaactctgtacaagccaacacattggctgcatcccttcaaattttcaactttgatgtagcctataccggtgttgttgtagccgtacttgtcggtcttatcatctttggtggtatcagccgcgttgccaaagcatctgaaattatcgttccaatcatggctgttctttacattgcgactgccttattcgtagtcatctccaatatcagccaattccctcatgtaatctatacaatcgttacatctgcatttgaaccatctgcagccggtggcggtctattaggcgctactgtaatgaacggtattaaacgtggtctattctccaacgaagccggtgaaggttctgtaccaaatgcagctgcaacagccgctgttaatcaccctgtagaacaaggccttgttcaagcattcggtgtattccttgatacattcattatctgtacagcatctgcgtttatcgttctcatggttggcgactatagcacaacagggcttactggtgtagcacttgtgcaacataacctagctcaagagctcggttcctgggcacctactgctgttgctgtattcatcgtaatgttctcctttagttcccttatcggtaactactactatggtgaaatcaacatcagccacttaacagacaaaaaatattgtcttcatttattccgtatcggcgtagtcctaatgacattcatcggctctatcgcatcccttgatctcgtatggaacctagccgatttattcatggccttcttggtattaaccaatattagctctatcgttcgtatgggccgtacagcaggccttgcgcttgatgattacatcaaacaacgtaaagccggtatcgatacacctgtatttaaccgttccgttcttaatcatacattcggtgttgtatggtggggcgaaggtcaaactacagattcctctgtacctgctacacctgtagaagatacaatcgaaaaataatatataccgattcttagggtctttattctttggaataaggaccctattttttgtgaaagctctaactatttacaatcatatccaactatagaatatagttaacattgtatgtagggtattcattcgtccatgtcgaatacaataaatagcaagacatttaaacgatccattgattctgaattatcaggaggacttgtatatgcaaaactataatccctatgaaaacatgttaaacacacttgatgtagcggccgaaaagcttggctacacaagaaatgattatgaagtactacgccatccagagcgcgaactcaaggtgtccgttccactacaattagacaatggcgaagtccgcgtatatgaaggctatcgttgccaacactccacattgcgtggcagtgccaagggcggtcttcgttttcatccagattctgatgaaaacgaagttcgtgcattagcggcttggatgactataaaaaatgctatcgctaatatcccttatggtggtggtaaagggggcatcaaggttgatcctaaaacattgaaccctcgcgaattagaacggttaacgcgtaactttgtacgtcgcattgcacctatcatcggcgttaataccgacgttcctgctccagatgtaaatacaaatgcacaaatcatgagctggattgttgacgaatacagcacattaaaaggcgaatggagcccaggtatcgttacaggtaaacctatcgaagtaggcggctccctaggccgtaatgaagctaccggccgcggttgccttatcgcattgcaatgctatttagctaaaaaaggcttagatattaaaaacatgactgtcgccgttcaaggctttggtaatgtagggtccgttggtgctcgcctcattgcagaagcgggtgctaaggttgtagctatcggcgacgtagctgttaatctatacaatccaaatggcctcgatgttgaaaaagcttatgaatatgctaattctcatggtcgttccttggttggttactccgagccaggcatgactaccattaccggtgaagaattgttagcccaagatgtggatatcctctatctggcagcccttgaaaatcagcttaacaaggacaatatggaaaatgtacacgctaagattatcttagaaggtgctaatggtccaactacaaatgatgcggataaatacttctttgaaaaaggcatcgatattattcctgacgtacttgctaatggtggcggtgtagttgtatcctactatgaatgggtacaaaacaaagctggcttctactggtccctcgaagaggtaaatgagcgcctcactagaaatatgcaaaatagctttgaagcagtatggcaaatgcaacaaaaatacaatgtagcccctcgcctagctgcatacatggtagccctcgaacgacttgtcatcgaagcaacacttcgcggttacaattgctaagattattctccaacaatttcatatagtaaaaggactggctttccattgtgaaagtcagtccttttatgttatatgctatgtagttatttaatggcgttcatcaaagcggctactgtacggcgagatgcgagagctttcaccaatgtagcacctacgatgcctgggattgtttgaccaatcaataaattgatcaccaatgcccagtacggaacacctatgagtgggctaagccacaatggtacgcataatgcaggtactaagatgattggcagcatcgcccaccacgcgctaagtccagcacggcgcatcaatacgatgataccagtcgtcaaaataccaacaccaaagccccctaccatatcaaggatgccaaggcccccgaacaagaaattagaaatgaggttacctatgcccataggaacgattaagaacggaaaggcataagcaagtgcatataaagatgtagctatacgaatttggtacgcaccgaaggaaattccttgggttagataaataagaacaatatacaatgctactaccatagcagaaatcgttaattttcgtgtagaaatcatgcactcacctccttttcaatcataaccacccgtagaacgggtggtttgctctgaccctataagggtctttctctagtggtggccctctaaagagggctttgaatgatctgacaaccactctattaccactggctgccccctactcgggggcttttattttgcctattttaccggctcacccgtaaacgggtcggtatattctttaaagtttaatgtatcttgtgctatatcttcttgtaattgattgcgaatatactcttttatcgctccttcgtatcttcccactgtatccacataatatcctctacaccagaaatgtctatttccatacttatattttaaatttgcgtgtttatcgaatatcatgaggctacttttgctttttaaatatcccataaaacttgatacacttaaatgtggtggaatagttactaacatatgaatatgatccggacagcattctgcctctataatctctacattttttctattacataaatctcttaaaattttacctacatcagcttttatccgtccataaattatttgccttctatactttggtgcaaaaacaatatgatatttacatctccatttactatgtgataagctttttacgtcattcattgacattgaacctcctatgttgaaatgttgtggttgccagaccaacttcattttaccactaggaggttctttccttttctctaagaattttttaccgacccccagtttaactgggggtttagtcatgcctattcggcgtacaataaaaaagagcatggcaaaactaccatgctcgaatgtgcttatgttttccgtagttttgtttagagacaggatggtttcaaactgtcttatgtagttgttcgccgtttggctcgatatttatcataacataaatcatttgttacggctaggtattattgcggtgatagaattgattgctttcgcacccgctccagctagcttaacggtcttcggccgagggcctcgacctactaaagtcgctctgcgaaagcaatcaattctactgcataatggtatatgctcaattgcattctttacgttatgttaacatatgctcgtcaaacggcgaacatctattttgacgagtctttgggagaaagcctcgacctactaaagcgctctgcgaaagcaatcaattctattgcataacggtatatgcgcaattgcattctttacgttatgctaacattggtccgccaaacggcgctcaactaatttgacggggtttcggcatagggcttcgacctactaaagtcgctctgtagaagtagtcaattcttgagcatagcagtatatgctcaattgcattctttacgttatgctaacattccaccgccaaacggcgctcaactaataaacgagttctcgggagagggcctagacctactaaagcgctctgtagaagtagtcaattctttagcatagcagtatatgctcaattgcattctttacgttatgctaacattagtccgccaaagggcgagcaactatatttaacagggcttagggatagggactcgacctactaaagcgcgggatcttctattccgtttgctcggaaggcttcttggcggtcgatgcaggtgccgcaatggccgcatgggtggtctccgccttcgtagcaggaccaggtgagttggtatggcacgcctagacgaaggccttcgcggactacatcggctttgttgcaattgatgaatggtgcttcaagggagcattcttgtccggagccttcaaagatggcattacccatagatgtgtagaatgtttctgtgcagtctgggtatgcattgccagctgcatcatcggcatgggcgccataatagatatagccacaatcgagggataaggctaaggatgccgcagcggataggaacagaccatttctaaatggtacataagtgctaacgggcccctccccatgttcatcttgttgttccttgtaggaaccagtagggacgtcctctgtggactgtttcaatagggatgaattactgaatgcaaacagttttgttacatccatcgttttgccttctatgccgtagaatgctaatacgttggctgcagcctctaattccttgctatgtttttggccgtattgtatggataagggcaccacattttctttgccgaatcgctcaatggcgagcgccaaacatgttgtgctatctacgccgccgctaaatagtacaacggctttttgcttttgtgccatcgttcctccttatgaaagcctcatccgtagatgaggctttatacgttagtatcgatatatgaagccaagctttcaccatatcacatattataattcaatatcgagttccactggacagtgatcactaccaaagatttgttgatggattttggcctctttaattttgtcgtccaagcgtttagatgtaataaagtagtcaattctccatcccacatttctatcgcgagccttgcccatgtaggaccaccagctatattcatcaaccgcatcaggatacaaataacggaatgtatcggtaaaaccagattccaacaattctgtcatcttagctcgttcttcatcggagaagccagcgttcttacgatttgttttaggatttttcaaatcgatttcattgtgagccacattgaggtcgccacagagaataaccggtttcttcttatccaattctaataggtatgcacggaacgcatcttcccaagtcatacgatagtctaaacgcgccaattcacgttgactattcggcgtgtagcagcaaacgagataaaaattatcatactcagcagtaatgacacggccctcttggtcatgttcttcaatgccgataccatttgtcaccgcaatcggtttaatacgtgtaaatacagcggttccactatagccttttttcacggcgctattccaaaattgttcataacctggtaattctaattcaatttgatggggttgtaattttgtttcttgcaagcagaaaatatctgcatctaattcgttaaaggaatcgataaagccttttgttacggctgcacgcaatccatttacattccaagatattaatttcattgatactccttataaggcatttatatacaatattatttgtgaaagttagctttcacgagcatgtttatgttttcgatcatgcttagcttgagcgcgtgcttgtcgcgatgcttcattggctttcatttcgttttccttacgatatctaaagtaattcgccacaacggataacaaaaagataatcataaccgttacattgaatagaccagggccgtaagtatacaaatgatagcataaataagcaaatgcaacgaccgataaaatatgatttaacattctcataatgtttcaacccccgtttgaattgggaattcatcataggttacccaatcgctagaactacctacatacaaagcagagttaagtcccgcttcactcataacaagtagagcattacatgcggtaacaccagatccacaataggtaacaacaggtttttgttgatagatttcattgtagaactcattttctaagtccttaatagaccgaggaccttccgaagtatagccactttcataaaaatggttaacagcccccggaatatgtcctgtcatgccatccataacatcgaccaccgaaccatcataacgttctggtgcgcgggcatcgacgataacatgagaaccggacttactcgcctccaatacctcattacgactcatggtcatatccgtttgtaatgtatagttaaatgtcgttggttctgtaggcaaaggggttggatccttagtcaataaatgaccttcttttacccatcgttcaataccgccagatagaacgcgtacatctttaaggcccatgtagcgcaaggtccaccaaaggcgaccagccaagaaaatccaagaatcatagacaacgaccttagagttttcattaataccaaatgtttcaaaggtcttagctaactgttccatatccggcaacggatgacgtcccccatgttcaccgatagggccggtcaaatccttatctatatcgacgggaaaagcgcctttaatatgacctcgtttataatcttgaaaccctcttgcatcgaggatgataacctcatccatgataggtaataattcgttaggagtaatgaaattagacataatgactcctttcatgtgattatatcgaaaaatacaaatctgttaataccattatatacgaggggagtatagaatacaatcagcaacggttattatacaaaaaagaggctataaatgcctctttaatattatatcttatctattttttgtaactcatcgccaatgcgctttacgatgcctgttaccaaagcattacccataaagaacattctcatccgatctgatacttcttcaacctcaccctttacattgagtttgaattttgtccaatcatccggaaaatcttgtaaacgctctgcttcaattggtgtaatcaaacgatatttcccatcaatttttaatagatgggttgagcgattgacactaccttccgatgtaagcattgtccgacctggcaaatccaaggaatcatattcactcatccctccctctgcataggtatattcatgaccatctgctgaggtacgtattaactttttaggtcccctgagatatttgaacttttcaagtttgtctccagtaatataatacttagcatcaactgtttcttctggaactacgattttccccattgtgatcggtggctcaacaattggattagtttcaatagtatagtaatatccattagtcatcaatccagaattccaaaatttaccatcattgaaagtttcggaaatctcggcaatatcgcctactaactgattcgcatgaattcgttttttaacagctgttccttctactgggaactgacgaccaaataaaccatctttaaaaatatagttttgatactgtgctaatcgttcttctatagttgtatctttagagaattttgcttcatatgttgtatgtaaacgtttaccccattttgtatcatttctaaatacaaagaagaaaacccgacgacgtcgctgtgcacgaccataatcagcagcattaataacacgccattcaacagaataacctagttcattaaacgcggctaacataactgcaaaatctcttcctcgttgactagatggagcctttagtagtctatctacattttcgagaactaaatattttggtttaataacctcggtagcacgaattatttcccaaaaaaggaccccttttttaccttcaataccgagttcattctttttacttcttgctacagaataatcttggcatgggaatccacctacaatcatatcaatgccattttgcttcatctcttcaaacttctcatttggaatgagtgcaacatcggtcccgatatgttccatattagggaatctatataagcctacttcgtaagcatcttgaatctttctcgatggttcatactgattggaatatagtgtttgaaagacctctttacttgagttctcaaggcctactataaatccacctacgccatcaaacatagaaaatatcttcatcataaccccttatcaataaattactcgaacatattatatcagattttagagataagatcaagatctatttctattatttatctaatcttataagtccttttctcgttactaaccaatgcgatgtagctaaattttctaattgattcctataaagtattatatttaaaggttgctcagataatatattcctaccagttaaataccacttaggatatgtctctttccctacaggttcatcaattttatcaagtgctttttgcaagattttttcttctaaacttactcttttatcagaagctacagtatgaaactttacgatatctgtatcagcagtgactatatttataatgtattcttgaatgtcggtcttttcaaaaaacatagcttctatttgtacaatgtcgtgatactttaagcggcttttattggtcccagcctgtacccataaccaacataataaatatcgctgtgttgcattatattttggattagtcagccatccctcttttaattgcccattatacatataagacacttcaaaggcgaatgtgggcatagctttttcctttaaattagtttttgcataatggatagcggccttttcatctacaacaattttctttccactcgtaagagtaagaacagtatcgctgcctgcatgctgtttatttaactctctagagacctcaaaatcaataatatatcctttttctttgaatctttcatagagaaaatcaaccaaaaacttatttacggcctgctctcccaacaagtcatcttcaaaattaaatttagttctctcactataatccataaattataactctctcactatttctgcaatatactctctatttaaccaatatgtctgttttgtaatcatttggccatctggtaatcgaaccttatcggctgcattaacagcttttggtctaatgtggcaaacgccattaaacttagctcctggtaaattattttttacccctcttggtgtttgtgttagttcaacaccaactgctaatatgtcatgcaccgtttgccataaatcttttaattcggtctcaataatttgctccggcatattccacaacttaatacctttcaaataaggtactctgttagggttctctcgttcagtctcagtaaattgaaatacaacaaataagaattttgtattttcaaatgtttcatatacttgggattcttcccaagatgcattgagccatctatcaaagtcaatttgttcaaatgacatatgttcacggggaacaccatttggttctaaacggatagtcttaaatttgatatttgccttagcaaattcctcagtatcatcaagactagtgccttttataccaagtagatcactgaccaaattagcatacatcgctttattcttgttttctgcaaagttaatgtggcgctttaattcatataatgtacgcccaatataaggtgcaaatctttcatgtaataactcatcaactgatttagactttaattcttctggtttgaaaactgaaattacgtcttcattcataagaattcgtcttacataagcagtcatatatgagctctttaacgaataggctctctgttttgcaggaatatcagaaaaaggttgctttcgcatactctttgcattagcaccttttgtacaagcggcaagatacatggtatccccctcagaaatttcatgagccttacccgctttgattttatctataataatttgccagtcttgcttaacaatagctaaatccgattcagaaaattgatggataacggatttaagaataggaaattcacctttattcacaccatcaatccatttataaaacataagcaagatttttttattcttatgccacaatgatgattcttcaaaagtacgcttatactcttccatataatcaataatattgagtactaatctttccttggctgagaaggatgtctgctttgcatttgttttgatgccagtaacctttaattcaagatctaggttagcaaaatcagcttctgcacgactattgggagccatatgaaataagccttcttcaatgatttgacctatgcctcccttatttttcttcgtctcaagtcgattagttacatcatactcctttacaagcttaccttctgcagactttgctacatctaaaacttcttcaatagaatcatagcgacgttcaaaatccattccaatcacctcccatttgttaatttaattataccaacttataaatatgaaataaacatacactgcattgcatatcaataaatatattacttactcaaatagccattaatgctttataatatttaatatttatttaataattatcagttatatgtatcttttttgcccctttaatctatgctataataatactgatatcaactgtatagaatataaagtatagatattttttcacaaacgcgttttacaaggagtattggcaattgaaaaagggttatattaaattaatcttagccgtaattctagggattgctgttattggtggtgggatttattgcgcttatcatttcctatccaataaagcaactacaatattatatcgctctacaattgaggataagatcaatgccttacgaccttatattgaggcagctgatacatttaatttgaatagtgttgcctatacctatcaaatacaaccaacccttgaagaattgcgcaatcatacacataatacgtctgtaacattacctgactataagaaattaaaagctcagcttgaagcagctaaagaagaaagttccacaccatatgaggatgtaaataaagcgacggatgaattacttaccatcttatcgcaattaattcctgtgtccgaccaacttcaaaactactacacagatagaacttttgaaaaagataattttgtaggtagtgataacttagctagccaatatgtaccattagcagatcaattcaatgcagcctataatgcatacgatttagcacttgaaaatcgtaataacgaattgtatacggaacgtatgaaagaattcgctgatgaaaacagagtcaatgcagttaatttcatcgaattaaatatactattatctcaaactatagatattatcgatcctgatggtaatacagatacacaaaaggtcgaaactaatctacaagaaattacaaaacgcttgaatgaattgcaacctggtacaaaaccagaaacacaagcagcggttaaacaatatcaagatgcggtaaaagaatttgttgcagaagcaagaaattacatcatcatcaactcctcctatggcgaagcatatacgcaattatatgtaaaatacaatcgcatgattggtcgcgctaatgaggttgatatgaatgaccttgatgcggtagacagcaaaaaataacaaagctgcaaagtaggcaaacatttttcttgcagttctcttctaaattacaccaatataaaaaaatagctgctgattgattatataacatcaatcagtagctattttagttttatagaagcctattatttataaatatgtacactatcatgattctaatccataaaatcataatctatagcacagatttttataaaagagatataagtttttaactatcataaatcattttctaatgatacgataagcgtctaaaattaatataagtctcctaaaattagttgtaaatcttcttcatcagatgctccagtttctaaaaccttatgatctatcgcattaagcatcaataattctttatccatcaaacgattataaatcattctatctaatgaatagtctttcccattaactttaaagtaatccattaaataataatattgtgtgtattgaccatcaggtaatcccaacctatgaattcgatctttagactgtagtaagtgaacaagattatagctatattcaaaataaacagcatcatgacatattgtatgtagagatactgactcagccaatgtatgtggattagtaattaataccgaaaacttcttatttttaaaatctgataaaattacatctcgttcatcccgtccaattgagccattaataatttcactcgaaatatttaacgcagataaagctcgctgtaaatcatacatacttcgcttaaatatacaccaacaaatcaccgttttcccttgtgttacaattgattcaattaagtcaatacatttttcttgctttgtacttagctggggagcattattaactaatatagaaatctcttgtgaacaatcaataaagtccatatcttctatacactcttgagtatcatcaaaaatatattcaaaatcagtaaaatctattttatctaataacattttgggattagattctaattgcaacaaacgaatgattaaagcaaacttattctttttataagcactcgataataattcaaataaacgttgttctctatcactcacatctaaagaaattatttcatctggatttgctttaggaacacccaaatcagtcttagatgtacgacagtaaaagggtaacaatcttgaatttaattcatcagctgtttcattagttaacttatctaattcattaattttatatctaaagaagtcattataatcatcctcatagagaatatgaagcatattatatatatctcgatacccattaggtattggtgtacccgtcataacaatagttcttttagatgaataagctatctcctttgctgtttttgctcgttcaccatctatacttttcacacgatgcacttcatcataaacaagaatacattttcctgtatctaatattttttttatagctgatttatagctttccacaccttcataattaaaaaggaacaaattaaaccgctcatattcataatgatatgtaccccctttactggacactcagtaaagggggtattttcatgagatatagttatgaatttaaaaagaaggcaatagaattattctatcaaggtgaatggcccgaaacaccaaatggagtatcgcctcattcttttcatgaacaaataaggtattgggctaaacaagaggagttgcatggtccagatattaataagttttatggagtaaaaaagaattggtctacagaggataaatatgagttagtatgtcaagtattagctggggaatctttacgttccgtagctattgttgctggaattaatagtggtctactatatcaatgggttcataaatacaagactttgggatacaatggtcttatcaataagcctaaagggcgacgaccaaaggattctgacatgaaagtaacaaagaatatttcacctagacaactcaatgagagtgaatacgaggaactcattcgcttacgagctgaaaatgcttatattaaagctgaaaatgaagtcataaaaaaagagattgccttgagagaagaaaaggaagctgcgcgtctcaaggcgaaaaagcagcgattatcaaaacactccgaaagcaaggatatcaactaaaatatcttttaaaagctatgggaatggccaaatccacctattattttgagctctctaaagtggatcttgtagatgaaagaaatatacaacttaaagaggaaatccaaaagatttttacagagcataagggacgttatggtgtgcgtcgtgtatatcaagaacttcttaatcgaggttttatagtcaatcataaacgagtacaaagacttatgaaaatcatggggctcgcaggaaagagaccaaaagaaaaatatcactcttataaaggtcaagtaggcaaaatagccgataatattatcaatagagactttagtacaacagctccatttcaaaaatggactactgatgtatctcaatttaactttccatggggaaagtgttacttatcacctatcttagatatgaatacgaatgaggttatttcctatgacttggcattaaggcctaatttagaacagatttctcgtatgttagatagagctttcaaaaagtatcctaatctttcaggattgatttttcactctgatcaaggatggcagtaccaacataaatattttaggaacgcacttaaagaacatggaattattcagtctatgtctagaaaaggaaactgttatgataattctgtaatggagacatttttcggtaggttgaaaacggaaatatattatggctgtgaaatggaatatccatcattcaatgcttttgcgggggcaattgaagaatacatcaactattacaataataaaaggattcagaaaaaaacaaaatggatgccccctgtaaaatacagggaagcatccatgtgtttaggctagtaaataatatgtgtccaggaaaatgggtacatatcataattcaataatcgttttttttcatcttttctagataatgaacaatcgtgagaatcaaaacatttcaatggaatattattaccaaaacaagcaatgaactcatctcgccatgaaccaaacgaatttttaggtccaactactataattttatcagcttcacctatttcaaataaataagcatatacccctaaaactacagatgttttacctgagccaggaacagaaaaattggcacacttcttcatagaatgtatataaaatgcatcccacatttgattctcacgtaaaggtcgaaccattagagaatcaacttttgacttaaatttactatatgattctagtaacctacaatcacgtgcttttatatccaaaccaacccgagatctctcctctatttgtatggatctctgttctaaaaaatctaataataattttgactgttttactatcatacctttatcacgagcaaaagtatgtaataacgcagtaatcttatctacatctcgataagtcctatcttttttgataacaatacgacttccatcagttaaatttttatcaacatagactggttttattttaatattataaatagcagaattctttaacaaagcaaattttatagtatcactcattttaataataatacaattatcttctaaatccattaatataatatcttcatcagctatatcttgattcataaccaagaaccccttattatatttcaataattcccttcgaataatatctggtatatcttttacaacaactcttggttgcttattattccataggagttcaaatatatttctagccttttgaatgccttttccaaaaggactattttcatcagaccaccaactacaattcaccgtaaagctctcatggtttttatgaagtcctgctatagtttcattattagaaccagaaaaagaaacccaattatcagctctatctttaagcaagccaaccttatcatgaaagagtccttcttgcataaatgcaattttaatatcaacaacacctatagctatcatgtaagctaaatttgaaataccacattgtaaagaggttatggtttcttgtcttaacttaccaagcatttcttcagtaatttcattccttaaagaatagcctttatgtatagcttcaaaatcacgctcactaatctgataagaaataataagtctacaatgtccattattaagaactaactgttctaaacctctagcatatgcagctaaagaatccattgaaaaataagcacttgttcgattatatagaactgcttcattcagcaaaggaacaaaaaacgaattaacaacatcatcgttagttgtatagtattgttcaatatctaaatcattaaacatctaaagcctcaagtataggttttactccttctaatatatccttaacagcaactttaagtttatctttctcatcagcaccaagttgttgaataaccgaagcatctattgcctcaattgtattttttgctttaattatcaaatctatgggttcttgacgtttatctgcgagattaattcgattctcaaatttttctttacttaaacgtgccgatttttttaactcctcatcactacttacatttataaaagagctttccttgtctaccacaggattttcattttcaggatttaatttttcatatgttttacaaactagttctaattgttcttctaaaaatgcatctccttcttttttattatttagtatactaccaacaaaacggatgtagcgagtgatatcaccatctgggcgcaggagcatattattaaataaaactaattttgattgctctcttcgatcctcatctttttccttttttaagatttttactatatccgctagaggtccatcaagtttatttacaagtgcataataataatcctctggtcggttaataaacttaagaaaatctactaaatattgtgcttccatcaataattctttagctttgctaagtttaatattagttgtatgtgcatattcctctatagttaatagtttatcaacaactatactactatagatatctactaatttatctattggactataatcaatacgttcttccgcacctaattgaatttgtaattccaataactttatttgtttaccaaaattttcatagccatcatcaagaataacggtttcaaaccgataaacttttcctggattctctctttctaactgacgcagacacgtaaagcgtcgattaccgtcaataatacgaccatcagctaaaataattcctggtatttgttgtgtattttcattaatattaatctttgtctttttaattgcttcaggattactatcaacgataaaattctcaatgatattgttatatgcttcaacatcagacatatctaaatcatctaactgattttcatttttatatttattgataaatgttgcaatacgagcatttttatcattgtaaaataaataattcaaaggaattgaatagacaggaaaattacgattttgcccatcaatatataattttctgttattctctgtcttgatgatccttggatctgaatctttaatttgatttaaattcttcattttctccctacccataataaataacaaatcccctataaatttctctataagcactcccctttataataaaatatttattatagtactgcacacagaccaataaatactttatgatgtacatagaaaatcgaaatttctaacctatattttagaaaaccattgttctattaggatgaactatagacatatgtatattttattatatcgtttttaaatctacctatgcaagaaatctagtatattacagtttttatatgtatttatcgcattaaaacagattcttatatttatacattttattttttcagtagttcttatagtttaaaaggaccgaaatataatactcaaaattgtattacatttcgatccctttattatttataaaccaatgaaacttattcttttttcaaatccttcgtaattacatagtattcactaggtgatgtgtgaatcccctttagatagcttttaccaatcatattaatcttaggatagccaaggaatatggtagcattttcatcgagcaaaatttgttgggcattgatgatagcattgcgtgcgattgtagcatctagcgtagaacctgcgagtgtcgtaagttcatcaaaacgggagttattaaatccagaaccattattcggattatctccatcgatattactaccccaatattgttttaaaaaccatacagggtcacccgtattagcagtaacgacactagaaaccaataaatcataatcaccggttttagctagttcatcaatcatcgtataatcgacaattttaatctgtacgtcaataccaattttcttataatccgcctgcattgcctctgcatatagcgtcaattcaggtcttgatgtataagtatataaaactagcgagagattttgaccatttttatctacaagtccatccccattggtatctgtccaaccagacttagctaataaagttttagccttattaggatcatatggattggtatcctttaattgtttaaatccataatcaaggctaggcggcaatggagccttaccggctatgaatgtatctttcaaaaggtttttagcatagctatcacgatctataccagcaataagagcagccctcaaattagaatccttcaattcacctttttgactcatacgtgccatcacatcgcgcaatgatgacgcctctgtaacagtatagtctttattatccgcaaacaaactgtactcaccaggtccaatgtttattgccatatcgatatcaccagattgcaatgccatcgccctcgtattagcatcattgatagagggtacttctacacgtttaaacggcacatcaccatcccaatagttttcattagcggctagttcagcacgttccttggtaaaggatgttaccacatagggcccagttccaataggaccatcggcactaaagtttcgaccctctcgttcagattgcacatctacaatgacaaacaatggatcgcccagagaacctggtaaattagggtacgccttatccgtctgaatcgttaatatttgaccatccgctgtaatagaatcataggaaaaaaacgtcttagcacgattacttttagcaaaggtccgctcaaatgactcttttacggcttgagccgtcacctttcgaccattgaaaaacttagctttgtcattaatggtgaaagtccatgtttttccatcctctgatacagaccatttagaagcaagccaaggctttgctttcattgtatcatcaaatttaaccagcgtttcaccaataccataacgtactacaacccagctaaaatagttctctgtaggttctaatgtactagcaaatccaatggcacctactcgtaaaatatctttatcagcactagagttcatcccacaaccagtaagaccaactacggtaaggcctaataaagcacatgtagccagcactcgtcttatgtttttcatttaatctcctattaccaatctgtatactcgacttgatatctatcaaaatatgttcatatgaataccttccaatatacctatatgggtatattgctttctttatcatatcctatttatcgaaagttctcaatcatctaatatatatttagcaaatagaaaagataaaagccttcgcatacgcgaaggctttcaccaataagattatatatttgtatcattagtaatggtatccatcgataatggattgtgtggtttaccaatttcaaaaatagaactcaataacacctttgtatatggatgtttagcatctgctagatggaacgcatctagttcttcaacgatagcccctttatacatgactacaaccttatggcacatagtacgaatgaaagctatatcatgagcgatgaacaaatatgttaaattccgtttcttttgcaatctagcgagtagataggcaatagagtcttgcacagatacatcaagggcactcgttgcctcatcgaatacgaggatttcaggttccaaaacgatagctcgtgcaatagctacacgttgacgttgaccaccagacatctcatgaggaaatcgatgcatgaactcgcgcggtaaatctaccatttcaaggtaatcaccagcgatttgttcttcttttcccttttcaagaagcccaaaattatatagtggttcaaggataatatccttaaccttcatgcgtgggttaaatgcagctgatggatcttggaataccatttgaattttctttcggtattctttcgtttgctcagagttcatatgttgaagctctacaccatctacataaatctcgccttctgtaataggtaacatcttcatgatcatacgaactagagttgttttaccagaaccagattcacctacaataccaagagattcccctttttcaagggtaatgttgatatctttacatgcttctagctctccgccagtcggaagagggaatcgtttgcatacatttttaatttctactgcgtagttagtcaatgtaacgacctccttccaatgttggtaccgcatcttttagttgttttgtgtattcattagatgggttttctaaaatttcttgtggcgtacctgcatctacaacacggccctttttcataacgatgatgtaatcggacatatacgccgccacaccaaggttatgggttaccataacgatagcggaattatgcactttagataattccatcatttgcataacaacttgagattgtgttgtcacgtctagagcagatgttggttcatcaccgatgagtaatgctgggtctaaggctaatgccatggcaatgccaacacgttggcgttgaccgccagacagctcatgtggatagcggcgaaggatatctgcgcaattaggtaacgcaacagactctaataattcaatagcacgacgatcacattcgtcattggagatttcaatgtgagctttgaatagttctctaaattgtttaccaatacgtacaatcggatcgagtgcactaccgctatcttggaaaatcatggccatatctttgccacgtatggatctccattctgacttagatagggtgcgaaggtcttgaccattaaagatcattgtaccatctgtgacctcaccacctacaggcaataaacccatgagggcccggatcacggtagttttaccggatccagattcccctacaatggttaataccttaccgcgttccaaggtaaaatttacatccataacagcaggcacaccttggtacgctatgttaaggttttctacagttagtatgttttctgccattatagctcctcactattttgtaattttgttagtaatccagtagtagtcacttgggtacatgacagcacctttcaagtaagaaccagtaatgatattagttttagggtaacctaagaacaatgcagcaccatcattcatcaataattgttgaatttggattgcatagtcacgacgttttgcaggatcgaattcagtttgagcagcatctaacaattggtcaacttgtgggttggagtaaccagaaccgttttgagggttggaaccattgttattagtgtgccagtagttagctaagaaccagattggatcgcctgtattagcagttacgatgttggagataagcatatcatagtcgccctcttgacccattttatcaatcaagttatagtcaactgttttgattttcatatcgatacccactttttttaggtctgcttgaacagcttccgcataaagtggtaattctgcacgagagttatatactacgaaattgaatgttaatggtttgccatctttatcaaggataccatcgccatcagtatctttccaaccatcttctgctaataattgtttagaacgttcaggattataggcattaggatctttcaaatctttgaaaccatagtccatggatggtggaattggagcagaaccagggatgaatgtgccttttaacaatacatcagcatagtttttgcggtctgttgcagagataacagctgcgcgaaccttgtcatcaccaagaacacctttttggttaatacgagccaatactacgcgaagagatgcaatttcatcaaccttgaacttatcgttattttggaataagcctatttccccaggaccgatgttaacagccatatcaacatcaccagattgcaagctcatagcacgcgtattaggatcgtcgatagaaggaatttcaacagtcttgaatggtactgcaccatcccaatagttttcgttggcaaccatttcagcacgttcttttgtgaaagattttactacatatgggcctgtaccgataggaccttctttagcaaagttacgaccatctttttcagattgtacgtcaacaattaggaataccggatccgccaaaagacctggcatattaggatattctttatctgttttgataattaattgttggccatttgcttcaatggattcatatttaaagaatgttttagcatagttagacttttcaaaagaacgctcaatagaagcttttaccgctgcggcatcaacttttttaccattagagaacttcactttatcattgattgtgaaagtccatgttttatggtctggagatacttcccatttggatgcgatccaaggttgagatttcatttgcgcgtcgaatttagtcaatgtttcgcctacaccataacgcattacaacccatgaaaagaagttttctgtaggatctaatgaggatgcgaagttagttacaccaacctttaacacatccttgttatcagcaccattattggagccacagccagcgatgaaggaacccatcattacaatgctaagacctgctaaaagagcctttttccaagattttttcatttaaaatctccttattaacacaatatacaaagcttatatatcattattatgccgcaaaggcctaataaagattccaaaaactaagattaaccttgattcttaggatccactacatcgcgtagagaatcagaccaaagattgaatatggatactacgattaaaatcgacaaaccagggaacgccatgagccatgggctcgtttgcaagtattgacgaccttcattaagcataagaccccattcaggtgttggtggttgcgcaccaaaaccaaggaatgataaaccggcaacttcaatcataatagccccaatatcaagagcccctgtggttacaacgagtggcaaaatattaggaataatatgacgacgtaaaatcgtccatgtagaggcccccatcataacagcagccgttacatattcttcaccgcgtactttcaacgtcatagaacgaacaagtcgcgcatatttagcccaccctacaaccgataatgctaagatggtatttacaatactaccacctaagataccggcgatggcaatggcgagcactacccctgggaaagataacatgatatctgccaagcgcataagaaccatttcaaccttgccaccaaagtaacctgctacggcaccgatgactgtaccaatgctcaccataatcactacgatggatacacccatgaacaaagataattgagtaccataaatgatacgagacaatacgtcacggcccaatttgtcggtaccaaaccaatgttgagtactaggtgcttgtaatgccttggacatatccgatgagaaagcatcgcccggagcaagccatggtgcaaagatagcaatgaatacgataacgagcatcaatgcagtgtagaaagagaacaatttatgtttctgaataaattctttcattatgctctctcccttttcaatctagggtccaatagaacataggatgcatcaactaaagcattgatacacatgtatgcaatagcaacccataacacaaaaccttcaatcaatggatagtcacgcatagtgatggcgtaaatggccatattcccgaggccaggccaagagaataccatttcaactacagctacaccacctaataaccaaccaataagaacacctaaaatagtgatcaatggcaatacggcattaggcaaaatgtgaccgaataaaatcttcatttcgctcacgccacgagcacgggcaccgataacgtaatccttttgcatctcttcaaggataacgagtcgaacttggcgcatgtatttagagcctacaacaaccgctaatgtaacggctggcaaaataacacctgtcgctgttacacgagatgaagcgattggaactaaaccgagctttaagccaaaaatgtaaattaatacaaggcctaaccagaatgacggcatagatacgcctataaaggaaaggcttctcagtacatagtctatccatttattccgattatacgcactcagtatacctgccggtaatgcatagagaatcgtaaataccaatgcggttcctgacaatgcaagcgtaccaggtaatgcttctaacatgcgatctactaccggttttttagcagagtaactcactcctaagtcaccttgtgctgcattgactacccagtttgcatactgtacgataaacggcttatccaagcctaattgtgctcgagtttcatcaatcatttcttgagacacgatggtatccgccgtttccagtagcatcgtaactgggtcccctggagctaaataggtgagacaaaatgtcaaaaatgtgatgccaaacaaggtaacaataaattgtcctaattgcttggcaaagcgtttgcccataggcacctcctataccctttttaaataaaactacataatagtgaataaacatagatacacataatgagtaaacatataatatgattccgtgtaataaaatttatgaaataaccataaaaaaagattagcctacctgactaacctaaattaaaacaccgtgttctagcacaatgttcctcaagattgagcaggctttctgacttttgactcatcacaatatttctgccttcccagtttcccagtgaccctaatacgaaatatcgctcctcattacagctattttcatagtataggatttacacccattttcctctttttacgctcggtaaaaccgacactcagtttattcacttttattaattataaatatactatatttataatcctccaacaatacatataccccttagtgtatattcgtcaatcaatcataattattcataaaaacaatattcattattatttacatgcattacttcgtatattgtgcccccatttcttgaaataattgctttatttacttttcttttctgtatataacgtatatatttacatttgtattttgatttaatttacatataaaacattttgctatgcatataaccaaaagaggctatcaccgaagtgacagcctctataagacgagagagtattcaattaatcgatactttgttggaatcgttgtgcacgatacgctacccaacctttgcgtatcatataaatgcaaatgccaatagttactgcaacagcactaccgagcatggcatcaacaccgcacgcatatactgcgtataaacagtataaaacacctgcaacagcaacgaaatagaaacgatcaatacgacgtttttccaatccagacatgtgcatcatagttggtactgcaataatgcagagaatataaggcactacattagttacaaccgcaaggtttaccaatgtcgcgaattgatcgcgtaaagaatcatttgctgtgaacaatgtaagaattgtttcaatcgctaataagataaatacgccacgcacaggtgcatccttgctgtttacacgagcaaacaccttagggaaataacctgcctctgctgcattcttgaatacgcgagacaatgtaaattgccagcaaagtaaagcaccacagcaagagataatcatgagcgccatgataacatttgcaattgtgtcattaaacatgtatgcaaatgtgagaccaaatggtgcattggaattaagtaattctgtgttaggcacgataccggccataacattcgtggacaagatgtaaatcaccgccactgctaatgtacctgcaaatgttgcaattggcacgtttttctttggattttctacagcatctgcatttgctgctgcagattcaaaccctaggaatccccacaatgttaaagcaatagattctttaattgcttcaaagaacggcaagtcgtttggattccatgccgccaaatacgtatctgggctaaaccagaaccaaccaattgtaccaatcagtaatactggcacaatacagccccaaatagtaatattgctgagctgacctgtaaagcggtttcctctaaagttcaaaatcgctgcaaaccataacaagacaatcgttacttgacttgtttgcgttgcatttagatcaacaccaaagaattctgagccatagccaactgcggaaactgcaatcgctatattagcaatgatgagagatatgctgtaagcatagctcgccataaaatgtccagtcttaccgaagcggtgttctgcataaccgcccatgcctcctttaatttgagagaacatacccgcttgagcaaaaatatacgctagcaaaagcgcacccacagccgtcacgagccaagataatactgaaatagtaccaacttgagccaaattggttggtaacataatgatcccagctcctagcatattggctgctaccattgtggttagctggaatacagacatttttttagcggtggttttcatgtatcaatcccctttcataaggtgaattttttctcgtccataattcacgtaactatattaaaaccgctaagtacattcagttcctgctgtaatgggcgggaatgtgaaagtaccgtttttatttgtttttcgaattaataataacaccataggtagtaaattaaaagtattttattagtggacaaagcatattacacgaattgaataaaaatatagtaattatatattatttttgattagaaacggtatgatgaatgtaagagtatcattttcttttagtttaatcaatttaatgtgctaaaaatcactatctattcagattatagtgttgtgccacaagaccattatccactacgagtccacccaatatagacaaaaattgaccccacctaaaggtggagccaattttataaactaagaaagcatctatgattctaataaaaaggaattactcttgtacagagtttacgatagatttccagctatcgatttgtgcttcttcgttagcaatgatttgcttcccattattacgttgtctttccacacattctggagccgtaccagaatagttgttacgacctgctacacaagcttcaatggaaatagcatctagaatatccgcatcaaaatatggagaaattgctttgaaatcctcaacggataagtcaagcaatacacaacctttttcgatacaatgatgtacagcattgcctacaatttcgtgcgcttcacggaatggaacgccttttttcgcaaggtaatcggccatatctgtagcattcgagaaatcgtcatcgaggacagctttcatatgcgccccattgaccttcataccgcgaatcatcgccgcattaatggacaatgcaaagtgtactgtatcgatagcatcaaaaataccctctttatcctcttgcatatccttattataggtaagaggcaatcctttcaaggttgtcaaaagacccaacaaatgaccataggtacgacctgttttaccacgaacaagttcacatacgtcaggatttttcttttgtggcatgatgctagatcctgtacaatgcgcatcatcaagttcaataaaattgaattcattagaggaccacaaaatgagttcttcgctaagacgactcaaatgcatcatcacaagagatgcaaaggataagaattctacaacatagtcacggtcggatacggcatccatactattttcgtaaatacgagagaagccgagtagcttttgcgtataggtttgatcaataccgtatgtagaaccagctaaggcccctgcaccaagtggcatgatgtctgcgtgtttgaagaccatcaacaaacggtcaaagtcgcgttctagcatagagaagtatgccatcatatgatgaccgaacaatacaggttgtgcccgttgtaaatgcgtatagccaggcatgataacatcgctgtatttttcagccgtttcgatgagggctttttgcatatctacgatgagctcgcccatttctactacggctttacgcacgtacatgtgtaaatcaactgcgcattggtcattacggctacggcctgtatgtaaacgaccacctgcttcaccaatatcatcggttaggcgcttttcaatattcatatgaatatcttcaagagccacggagaatgggaactcacctttatcgatttggccttttatctttgttaagccctcaacaatagcgtcccgatctgcgtcggagataatattttgttttgccagcattgtagcatgtgctttactgcctgcaatatcttcggcgtacatccgcgcatcaaaagcgatagaggatgtaaaatcctctaccgctttatctgtgccttttgtgaaacgcccgccccacaatttagccattatttacctgccttttctttcattaatgcattaattttaagaggtaaaccgaacaagttgatgaaaccagccgcatcagcttggttgtatacatcatcttcttcgaatgttacgaaatcttcgctgtacaaggagtatggagaagttgcaccagcagaaataatgttgcctttgtacaatttaagttttacttcaccagttacagttttttgagtttcatcaacgaatgcttgcaaagcgttcatcaatggtgcgaaccacatgccatcgtatacaagttcagcgtatttgttagcaataagttctttgtagtggtatgtagctctgtcaaggcaaaggtattcaagttctctgtgagcatacatgatgatggatccacctgggttttcataaacgccacgggatttcatgcctactaatctattttcaacgatatctacaacgcctacgccatagtgtgcaccgatttcgttgagtttttctaacaattgtaatggagtaccttcttggccatctactgctacaggtacgccatctttgaaggatacagttacataaccagcttcatctggagcttgttcaggcgtatgtgttaccaagtacacatcatctttaggcgcatttgctggattttcaagatcgccgccttcatgggacaaatgccatacgttttggtccatggaatatggatgggatttcgtagctacaactggaatatcatgtttagctgcatattccatgcagtctgttctggatttcaaatcccattctctccaaggagcgatgattttcatattaggagccaatgctttgatagcaagttcaaaacgaacttggtcattacctttaccagtcgcaccgtgagcgatagcatcagcgccttcttttttagcaatatctacgaggattttaccgattaaaggtctagcgaaggatgtacctaataaatacttgccttcataaactgcaccagcttttactgttggccatacataatcttttacgaactcttctttagcatcaacgatgtacgctttagaagcaccagatttgattgcttttttctcaactgcatcataatcctcaggttggcccaagtctacgcacactgcgataacttcagctccataattttctttcaaccaaggaatgataacagatgtgtctaaaccgccagaatatgcgagtactactttatttgcttttcccatgataacacctcataaactaaattatactaggtatgattcataccatttattattatactacgaattcattatgaattcttcatgtcttatcgactacaggtgttagtatatcactgcatatttataaatgcaagcagaaattttattcaattatataatatatttcgtttacgaataatatatgtaaataaaaacaatcatgatgcaagtatgtatagcaccatgattgttttatatgcattataatattaatattttatcttattctataccaagttcttgcttatatgcatagtccgcctccgcttgagatatcataccttgatctaccatttgcgcaagaactaatttttgccgagctttagcacctttataattttcataaggatccaaataggttggtgcattgggcaatgccgctaacattgcacattgacctagggtcaaccgactagggctggtgccaaaatacccttcggcagcttcttttataccataataattatgtccataatagaccgtattcaaatacatggttaaaatttcatctttgctatagtaatgctccatctctactgctagaatggcttcttccgctttacgggacatcgtccgtttcgacgacagaaatagattttttactaattgttgtgtgatagtactaccaccctcgacggtttcaccagcaacactattaacataaaaagcacgcgtcacaccgagcacatcgatagcaccatgcttgtaatagcgtttatcttcaatggccactagagctcgtttcgcattgtctggaatgttttcagatttcacccatttatcccttggcacacgttgatgaagcgcggcttcaaccttttctcggaaggtaaaaatacgatgcatgcgttcccaccgacttaatgtatcttcattttcttcaattgtctgttctacagttgtatgagccttactaacacgatttgttccttgatagctttgatatgtatcatacacatatatagcccctagcactatgcaaatgataagaactaatcggcgcaccattcgaaatataaacatagattcacctatatctaccttacagcagacttctaagtatataaactttcactaataacatccctataatacaactatcatatattgattgtattgtatcataagttatctatttttagcatacttgtatgtgttgtatttgttaaccatattgtcgtataatagataagatgatgaagcatgcccaaattggaggagtattatgaaacagtgtatggattcagacaatctacatcgtcgattgcgtaaaattttaggtcaagtgcaagctattgatcgaatgattgaagaagacattccttgtgaagatgtactagcccaaatcaatgcagccaaatccgcgttgcataaggttggccaagtggtcctcgaaggacatatcaaccattgtgtacgcgatggtatacaacatggtgatgtagataaaacaattaatgactttacagttgctgtagagcgctttgccaatatgggaaaataaaaagaggcaatatcctaatgatcagggtattgcctcttttgcgtattagtcgtggttcgttgttaagaactcgctaagtgctgctaatgcatcatcttcatcagcaccatcagcagttaatactacggatgtgccttttgttgcacccaatgttaatacagtcaaaatggatttagcatctgcggttttaccatttgctgcgattgtcaatttggacgcaaattttgcagccaattgtgtaaatgcagtcgctggacgagcatgtaaaccagattcgtttgtgatttctactgttacttctttcatgagttacctctttctacggagcgcacaaaaacgcctaatatctttgctattaatataggtattgtatcagtttacccctatcaaattcaagtttgtttttatgaaagctatggtctatgccaaacctttttcagcaagtaatgattttgcataggctgtaatttcttcagctgtatccatagtcaatgctttttgagcaaatgcttcacattctgcttttgtaacagagcgtaaaatatttttaatcaatggaatggatgatgcagtcatagagaattcatcaagtcctaagcccaataaaatcatagttgcaactggatcaccagctaactcaccacacatacctgtaaatttaccttgttcgtgactcgcatcaattacgtgtttgataaggcgcaatacagcgggatgcaatggttgatataaattgccgatggcctcattcatacggtcaaccgccaatgtgtattggcaaaggtcattggtaccgatactaaagaaatctacatatttagccaaaatcggagaaataacggctgccgctggcacctcaatcataatacctactttgatatctgtattgaaagctaccccttcagccattaattcttccttgcattcgtcgagcatagcatttgccgctttaacctcttctacggatgcaatcataggatacataatgtgaatgtcgccaaacgcactagcccgaaggagtgcacgtaattggaccttaaaaatatccggacggttcaaggagatacgaatagcacgatacccgaggaatggattcatttcttcaggtaagtctagacattttaattccttgtcaccgccgatatccatagtacggatgatgacaggttggcccttcatactctctgctacttgtttatattgttcaaactgtacatcttctgtaggtagttcatcattttccatgtaaaggaattcggtgcgatataggccaataccttgagcgcccatggtcaacgcatggtccgcatctttggatttaccaatattaccgaataaatcaacatgatgtccgtcctttgtaacggcttctaaattagcagagtcctttaaacgtttcaactcgtcttggaaatctgcagcttcttttgtataacgttcccactcttcatcggatggttccgtaatcacttcaccatcagtgccaagtacaacagcacgcacatcgtcagtaaagctttcaatatcaccaacgcccataacggcaggaatttctaaggtacgcgccatgatagccgcatgagatgtcggaccaccagcagctgttacgataccttttacaacatttttatctagtgaagccgtatcagatggagccaaatcgtgagccacgataataacctcaccggaaatatgagataaaccacgagggttcatgccaagcatgttacgcatcaaacgatcgccaatatctttaatatccgcaccacgttcacgcatatatggatcatccatgccgatgaaaatagccgcaaaggtttctatcgtttgcgccgtagcagctacgacgttcatttttgaattttctacaagggacttgataccatcagacaaggatgggtcttgtgcgatttgcatatgagcttcaaaaatagcagcctcatctgcccccatatcaaccaatgctttttgacgaatcgtatctaattgtttaagggttgcagccatagcgctagcaaatttgccaatttcaccctctacttggtcatcagtcacctcataatcaggtattacgatttcttcttgtatatatttgtacacattgccaacagcaacgcctcgagatccagaaatcccttgaattcgcatgtgtgttcctctttctatatccgataaactacattacattatattttaacatttttacattgaacaataaagagagaccctattctgtgatataatgttatattatatatagttaaccgtagactttcacgagtatcatagtgaaagtctactctattgtaaggaatagtcgcatttatctagtgtgacatcgaataggagtatgtatgaaattaacaaaaatgcatggcctcggcaacgattttatcctcttttctgactcacaaggggccaataaagattatacagatctcgccatccgcctctgcgaccgtcgtacaggtatcggcgccgatggtcttgtaatcgttgtaccatctaatacatgcgatgtacgcatgcgcatcatcaactcagacggcagcgaagcagaaatgtgtggtaatggcattcgttgctttgccaaatatgcctatgaacacggtgaaattacaaaagatactttcaccatcgaaacattagcaggcgttatgaaaccaacattaaccattgaaaatggcattgttacacaagtaacagtagacatgggcaaacctttctttaacagcaaagacattcccatgaatgtaaccatggataaggtcatcgatgtggacctcgatgtaaatggcgaaacagtaacagtaagttccgtccttctcggtgtacctcacacagaagtttttgtggacgatatcactaaagcaccggttacaacacaaggtccaattcttgaaaaacacgatgcatttccatccaatacaaacgtgaactatatcgaggtcgtaaacgaccaccatattaaggtccgcacttgggaacgcggtgctggcgccacgcttgcatgcggtacaggttcttgcgcatcggcgatcatgtcccacgaaaaaggccttacaggtcgcgaggtcgatgtagaattatatcttggcacattacacatcagttatttggaggatggcacggttcttatgacgggccctgctgaggaagtattcgaaacagaacttcctatcgaataatatgaagtggttacaattactattacaggcatacctaaaatataaacaagggcgtaccatgatgccaaacaatatgggactattgatatcattaatcgtttctatcatcattattctcgcatctgtcatgtttagtgttcccatcggctacgcattaatcctcgtatggttatgcttcgcttacgctctatatcgacaaggatataatccaaaagacttactccgcatgtcctggaccagtgccaaaacctcaatcgtggttatgcaaatctttttgctcatcggatggctcatagccatgtggcaagcatcagggattattcccatgattattgcgtctggtattgaattgattaatccaaatcttttcataatctgcgcatttttaattacatcctgcgtgagtatgttacttggtacatcgctaggaacagtgggcaccatcggtattgtactaattacaattgccaaagctggtaatctgcctattgatattgtagcaggtgccattatggcaggcgcctatttaggagacagaaactcacctctatcctctagcgcctctctcgtagctgctctaacgcacaccaaagtaaatagcaatataccaatcatgttgaaagatagcttacctgctctcatcatcagctgtatattgtatctactcttatccctatggtttccactagactacactaacagttatctaccggatacgattcatttcgtgtttaatatccattggacattatggataccagttcttatcattattggtttgttaccaacaaagctatctatacgttggcctattggcattagttcactggtggcaaccatcctcgcagttatccatcaaaattatacagtaatggatatgttacaatttaccgtattggggttccatctaccggattataatccgctatcggatattatccacggcggaggcctacaaacgatgtggataccaaccctatctatattcatggcttgttccatttccggcatgcttgaaggcgttggtttttggaatgatattcgcagccttttacaacacgtatcaggtcgcgccaaactctttgcgtcgaatgtactaattgcatttattacaggtgctctaggttgtagtcaagcaattgcggtaatcatgacgcattccattatgcgtaccacctatgcaaaggaacacattcatgacgaagatgtcatgctagactttgaaaacagcggcatccttattgcagccttacaaccatggaatatcgcggcactcgtacctgtcattatgatggatgtctcgcctgccggttacgtaccctttgcgttcttcttatacttagtaccactgatctactggtatcgcttgcgacgcaaggagcaacaaatccattaatacattctattttttacgaaatatagaggaaaacttatgatttatacgattactttcaatcctgcattggattatatcgttcgcttagaccacttaacacctggtactatcaatcgtacggaacaagaatatgtgcttggtggcggcaagggcatcaatgtatccatcgtactcaacaacctaggcatggatacgacggcactcggttttatcgctggctttacaggtgatgaaattgtgcgtcagctcaatgaatttggcgttcgtgaaagctttatccgtcttagagatggtttaacccgcatcaatgttaaggtaaaagcatccgatgaagaaacggaaatcaacggtcgtggtcctatcatagccgatgatgaactacaggccttatacgcccaacttgatgcattaacagagcaagatacattaatcttagcaggcagcattccgtctagcctcccaagtgatatgtacgaaatcattatgaagcgcttagctaataaacatattcgtatcgtcgtagacgcaactaaggatctattaactcgtgtattgccatacaaaccatttttaatcaaaccaaacaatcacgaattaagcgaaatcttcggacgtacattgtctacaaaagatgatttagtcactgcagctaaaaaattacagtcccaaggtgcacaacatgtgctcatctccatggctggagatggtgctatcttgatatccgctgatggtacagtctatacaagtcctgcacctaaaggaacgcttattaactccgtcggtgccggtgattctatggtagctggtttcatgactggatacctcaacacccaagatttacaacaagccctctattggggtattgctacaggctctgcttcagccttttcggagaatctagccaacaaggatgaggtcctcgccttgcttaacaccattcgttaatattattattcattatatatgtacagtaaggagtacacacatgaagattactgatttattaaagccccaatcaatcctgctgaatgcatcaccaactaacaaagcggatgccatttacactctaggtgatttaatggataaaggcggcaacctatctgacaaggcagaatacttagaagctgtctttgctcgtgaagaatccggttctactggccttggcgacggtatcgccacaccacatgctaaatcagcaggtgtaaaggaagctggccttgctgctatggtcgttcctaacggtgttgatttcgaggccctcgatggacaaccatctcgcctattcttcatgattgcagcaccagaaggcgcagctgatactcatgtagaggtattgagcaaattagccactatggtaattgatccagacttcaaaaacgctctcatccaatctgctacagttgaccgttttctagaacttatcactgccaaagaagaaggcaactttgatccatctgtagaaggctatatcaagacggaagatgaaaaagcaccaagcattaccgatgctatcgaagcaaaagctacagaggctatcgaaaaagtggttcctaaggtatctgtagataatccacattacgaagtattagctgttacaggctgtcctactggcattgctcatacatatatggctgcagaatccttggaacgtaaagctaaggaaatgggcatttctttaaaggtagaaaagaatggtgcttctggcattaaagatgcacttacagcagaagaaatcgagcatgctaaatgcatcatcgtcgcttctgaccgccaaattgaaatggctcgttttgatggcaagccaatgattcaaactaaggtggcaaacggcattaataaagcagaagaattattgcgtgaagctatgtctggtacagcaccggtataccatgcctctcaatctgacaaagatagtgctgaatctgctatcgatgcaaaagatagctttggccgacaaatctacaagcatttgatgaatggcgtatctcacatgttgccattcgttatcggcggtggcattctaatcgctctcgcattcctatttgacacattcgatccagctaatgccaaaaactttggttctggcacaccattatccgcatttctaatgaaaattggcggtgcttcctttggatttatgttaccagttctagcaggttacatcgctatgagtattgcagaccgtccaggtcttgtagctggttttgttgggggcttgctagcaaaccaaggtggttctggtttcctcggggccttgattgcaggctttgcagcaggttacttagtactgttagttaagaaactcgtatccggattacctccagcattagaaggtacaaagccagtgctcttctatcctgtactgggcgtattgttcattggtatcgctattacatttatcatcaatccaccagtatctgctttgaacgaatggcttatgaattccttgcaaacaatgggcactactagccgcgtattattaggtcttgtcttcggtgctatgatgtctgttgatatgggtggtcctgtcaacaaagcagcctatgttatcggtacaggcgctctagcaactggtgaatatgatattatggccgctgttatggctggtggtatggttcctccattggcgattgccctttgtacaacattcttccctagccgcttcacagaagcagaacgtaaatctggtattacaaattacatcatggggctttccttcatcacagaaggtgctatcccatttgccgcagctgatcctatccgtgtattgccttcttgcatcatcggtgctggtacagctggtgcattatccatgttctttgaatgtacattacgtgcacctcacggtggtatcttcgtagtaccaacaatcggcaacccacttctttaccttgcatccattgcaatcggttccgttgtggcttgcattatcttggctatcgtaaaaccaaaactcaaaaaataatatcacaatttgtctatttagtttaattattataaatgactgattaataactaatgtatgcaaaacaccctatgtcacaacactgacatagggtgtttgtatttataacttatatcttcgatctgctcatcggattacatcatcataaaatgtaccatataccattttaaatacgcgattagcaacatgatagctttcaaaatcaaagtccgtaggtgttaagaatgtaacattctcatagcctttaagagctggttgtgttggtttactttcaccattaagagtgtaatcctgttgatttaataccatccctacaataccagattccatcatttttatattccatagttcatgtaaagaaaaatctggcagtcttgtttttagctttgatgccttggctaccatattagcaagggaaaggtttaagtcatagtcataacgaaccttatattccctaattaaatcagatgaaggcaatacaacatatatcttagcctctatattttttgtatgcgcatctgtagaattatttcggatagtacttaattcaatatatttaccatctccaccacctgtatcacctttagatataattcgtgcaaaacgactagtatcttgcaactcagtattggacacagccttcacagaatttaaagaagcacacaaaacacataccagcgccacaagaaatacaaaatgtttcataaggcacctcatttcactacaatatcgtcaaaatgctgctgatacgctacagtaaacatagcgtctgctacagcaaataagtcttcatcaaaccggccacgatctataggacgtaattgatgcactaaaggaactttactagtaacctctgtatcgtccccattatatcgtttcacctcttgtaactcgacttgtatgcctgattcatcctgtgcagccttaatcacagcatacatagatggtgatggctttacaacattcatagcttgtattaaggaccctaatgagtaattcgtatcataggtagtagttaattcatattctgtaatagatgtacttcgaggagtttcataaacagcataaaaagtaccttttaatttatagtgcggtgctgcgtattctagagactctacagaatatgtatttaaataacttattagcttattttgtatagaaccgccttcataaggatacgatttttgatacacatttttaaactgcgatgaactatttaattcattaattgaaatagcttgaatttgcatggtaaaagcagccatcaccatacatgctaataagaattttctaaacatgttctctcctttaaaaacaaaactcgattaaattacccaaagcataccatattttattgagaaatgtatacataagtctaatattctctcgacttcaaattgtcagcattaatacctgtattaccatcaattattatagtagtattaccttctgctacagtttttttcttaccgctatttttacaaatttagaaataactacataaccagtcttaaccttattccaaattacttgatatactttatcttctcaacatttagatgatttagtttctcttctgttttctataatcagctattatgcctctataacatatgattttaaatttaattctaaatttctaatttcctgtaataccatttttgcttgatatagcctatatttatggaaattgtacaattagccatatttatgataaactatataaatataaataatttttaaaattataaattattatttgaaatctagttcggagaataattcatgaaatcatctaagaaacgtcaagtgactgctgcgttttttgcagcagcagcattgggtggcgttgctcacgcagctccggtccttaacatgaatgatttagtaggatctaaaactacttctgaatcaacgacagaaactattaataatgtagcgactccagtcatgcgaccaatggatactcaacctacggcaccaactacacagccaacagtgattactcctcaaccagcagttgcacaaaatgtacaaatacaacaaagtggtacagtacaattagctccaaaagtaacgcctatgatccctcgtgtgcgcccagtaccagttccagatacagctaaagctttagaagaacaatatagagctgtgtcgcaaccacaatatgttgttaataaacaaacgaatactatgatggaaccaacattggcaatgcatagtttaatcaatgtacaacgtaaaactgaaccggttaccattcaaaaacaagtagatggcaagcagcaaatgcaaacaacgcaagtacaacgtacaccgatcattgtgcaagaacaatctactacaccattagtagttgccaatacaaccacgactaaatcagttattgcaaaacggacattaacaattcgcgatattcaacgtgctgaacgtgagcgtttagctaaattagcggaagaacaagctgcacaacaagaagcaatgcaacaacaaagcagtgaacaagcgcaagcagtgcgccaaatggcagctgaacgagctgccgaatctcaacgccaagccgcattattagcacaacaacaagaggcacagcgccaagcggagttattagctcagcaacaagaagctcaacgtcaaactgctatcaaagcggaacaagagcgtattgctgcagagcaagctgaggctcaacgccaagctgctattaaagcggaacaagatcgcatcgctgcagagcaagccgaggcacaacgtcaagctgctattaaagcggaacaagagcgcatcgctgcagagcaagctgaggctcaacgccaagctgctattaaagcggaacaagatcgcatcgctgcagagcaagccgaggcacaacgtcaaaccgctattaaagcggaacaagatcgcatcgcggcagagcaagccgagacccaacgtcaagccgctattaaagcagaacaagaacgcatcgctgcagagcaagctgaggttcagcgtcaagccgctattaaagcagaacaagaacgcatcgctgcagagcaagccgaagctcaacgccaggcggctattaaagctgaacaagaacgtatcgcggtggaacaggctgaggcggatgcagaaaaagctcgtttagaagcagctgaggcgaaagcagcagcagaagcggctgcaaaagctcaagctgaagctcagcgccaagcggctattaaagcggaacaagagcgtattgcagcagaacaagctaaagcagagcaagaagcaaaagctaaggctcaagcggaagctgaggctcagcgccaagctgctattaaggctgaacaagaacgtattgcagcagagcaagccaaagcagcgcaagaagcaaaagctaaggctcaagcggaagctgaagctcagcgccaagccgctattaaagcggaacaagaacgtattgccgcagagcaagcaaaagcagcacaagaggcaaagattaaagcagaacaagaagctaagactaaagccgaggcggaggctaaggctcaggccgaagcaaaagctcgagcggaagcggaagcaaaacaagctcaagagtctaaattgcctgaatcgtatgttaatgaacgtaatcaagcttctaccaaaggttctactacagccggtgaaaaaaatatactttcacagccaattgatccaccattacaagctgatacgtctgcaaagattaccctcacctttgacatcaataattacgagtcaatgacgggaacggtagataataaagagattaaatatcgcgcatttgaatatatcccatatgtatcaaatcctatcgatattgatcagcagtacataaacatttacatacctgaagagtatttcaataatggcactgtaaatggttataatacacaaacagcaccaatctttatgccaaataatgttggcggttatatgccaagccaacctatggcaccaaagctagaaaataataagccaaatagtgctctctatgcattgtctagaggttatgttgttgcatcccctgctacacgtggccgtacaaataaagcttctgatggtaacttcatcggcaaagcaccagcagtcattgtagacttacaagcggctacagcttatttacatgctaatgatgcgactatgccaggtaacgcaaaacatattattacgaatggtactagcgcaggcggtgccgtttccttattacaaggcgcaacaggtaatacatctgattaccaaccatatctacaggctctcggcgctgctactgcatctaccgatgtgtatgcatcctctgcttacgcaccgattacaaatctagatgctgcagatatggcttacgaatggagctataacggcatcacatcatttaataaagtgactatgggacaaggtgaattgcctcaagcgaatgtaggcggtgcaccggctccaatgcaacgtagtgtacaacgtgtgaacttaacgaatgatgatgtggcatactcagatttgcttaagagccacttccctgactatgtaaacaacttacaattacgtgatagaactggcattattttaaaactcgataagaaaggtaatggcacattcaagcaatatgtaaaatctttcatcatcgatgccgctaataaagctaaatctaatggcgctgatttgtctcgctattctttcttaatattagataagaatacaggtctggtgaaagatattgattgggacgcttataatagctttactagtcgttctaaggtaccaggtgcatttgactctagatctaatgattctggtgaaaacagcctattcggtacaagcactagcgatactaatcacttcacgattacagcggcactacatgatacaacgactaataatgatgtatatgtagaaaacgctaaaatcgttactatgatgaaccctatgaactatcttggttctcctagtgcaacaaacgctaaatattatcgaattcgctatggtacagcagatagcaatacatctgttgccatcccattaatcgtaggcactcgtgcacaaaatctcggatatagtgtagacatggctacaccatttggtgtggatcacgctggcgattacgatttacaagatttattcaactggatggattctattgtaaaaaacggtagataatctatctcgattataaacttattccataacgtaacaagtctgtaatagcctccatacatgatgctattacagacttgtttgttatttttatcttatatcgacaacaaaggcgtcctaaacaagtagggcgcctttattactagtattatattgaaatgttattaatcttcagggaataaagcagtagacaagtaacgttcacctgtatctggaagaataactacgatattcttacctttgttttcagggcgttttgccaattctgtagcggcccataatgcagcaccggaggaaatacctaccaagataccttgtgtatgaccaaagtcttgtgctgttttaaaagcatcttcgttagcaacttgaataacttcatcataaattttagtatccaatgtttcaggaataaaacctgcacctaaaccttggattttatgaggacctggtttaccgttagataatacagcagagtctttaggttctacagctacgatcttaacatcaggattttgttctttcaagaaacgacctgtaccagttaatgtaccacctgtaccaacaccagctacgaagatatctacagcaccatctgtgtcaccccagatttcagggcctgtggttttatagtgaattgcaggattagcttggtttacgaattggcctgcttctacagcaccagcagtagctgttacgatttcttttgcctttgcaatcgcgcctttcataccaagtgcaccatcagttaacacgagttgtgcaccatagccaagcattaatttacggcgttcgatagacattgtttcaggcattacgataacaaccttataaccaagcgcagcgcctacagcggataaaccaatacctgtattaccagatgtagcttctacgatagtaccgcctggttgtaattcaccagatgcaacagcagcttgaatgatagcagcagcgatacgatcctttacggaaccacctgggttaaagtattcaagtttagctaaaatattagcatcagcacctacgctttcaccaaaacgagtagctgccaacaatggtgttttaccaattaattcaacaaaagattttgcgattttagacataatcaacactccttatattcggatattatggatactataaatggtatgtaatatataattatgtgtctcttaaatagagccatcccaattatcatattttgtatctagttttgcgtatgtaccatcgataacgtcttgtaaggtcacactttctagataatcgtgaatgtaattttgtaaccccgcccagaatccaacggtgcgttcattaatgacatcatccgtagatacaccttcatctagagatgcaataatagccattgattcctctgtagccatcaaaatttcaatgattgtatattcactaggttttttagataaacgatagccgccgtatttaccacgaatgctatcaactaaactggccgctcctaatcgagccacaataccttctaaatatttctcagatatgccttgtcgttctgcaacagaacgtaatgacactggttttccctgaccttgctcagctagatcgatgagaaccatcaaagcatatcttccttttgtagaaattctcatgtatattgccttcctttttaaaagctagcgtcccttgaacaaacattttatataccttctatgcgaatgtataaaaccttgtacatcgctaggaattaatttcattatagaatactaactgtaaaaatgcaagagtttatttcctactttgtcaaaaggttttacgaataacagtatttacctatactaaatggatacactgcgacaaaaagaccagccaaaaggctggtctttttgcgtatagtttgtagtttgttatatgaggtttacattagtgaattggagagtgtttcaccatgtaatggggcttaccggtatcgttggagatacgatccgtgcccaagagttgtcatttgaggaggttgttggtatatctaatactcttagattttacctactaggtcaagacctggtgttaatgtatctttacctggtttccaacgtgcagggcacacttggtcgccatgtttagctacaaattgagcagcttgtactttacgaacaagttcttctgcagaacggccaatacccatatcgtgaatttccgctgtgcggataatgccttctgggtcaattacgaatgtaccgcggtatgccatagcagattcaggatcgaatacatcgaagaaatcagctaattcgtgtttcttatcagctagcatgtagtattcgattttattgatacttggagaagcatcggaccatgctttgtgaacatattcagaatcagtagatacggagtaaacttcgcaacccaattcttttaactctgcataagattcttgtacgtcttccaattctgtagggcatacaaatgtgaaatctgctggatagaatacgaatacagaccatttacctaatacgtctgcagtgcttacttttaccaattcaggtttcttgaaagcatcaagtgtaaattcagggagtttcttaccaataatagacattgtgtcctcctttatatttctaaataacgattactatatgttctattgatgtacctacatcaaatctatatctatctttgtctatataataacactaatcatttaaaatagcaagtgttatttttaaatttatcgatatatttttgcaagttttttcgatacagcaaaaaaagaaggaagatactcatttctgagtatcttccttctttttacgtactacaacagacttacttttttagttctaaaatcgcatctacaaatccacggaataatggatgtgcattattcggacgagattttaattctggatgcgcttgtgtacccacgaagaatggatggtccttaacttcgatgctttcaacaagacgaccatctggagatgtaccagaaataacaaggcctgcatcactcaattgttgacggtattcattgttgaattcataacgatgacgatgacgttcgtatacaaggtcttcgccatatacttcacgcgcttttgtacccgcttctaatttacatggatagatgccaaggcgcattgtgccaccttttttatctacatccacttgatcactcatcaagtcgataactttatattttgcatcttcatcaaattcgctagatgtagcaccttccatggcacatacattacgagcaaattccattacagcagattgcatgccaaggcataaaccgaggaatggaactttgttttcacgagcataattgatagtacggatttttccttctacgccacgggaaccaaagccaccaggaacaacgataccatcaatgccctcaaatacttctttaggatctacagaaatatcatcaagttcttcggaatcaatccaacgaatgttcaccttagtatcagtctcgataccagcatggctcaatgcttctgctacagaaagatacgcatcgtgcaaagctacatatttacctacgatagctactgtaatatctttgctaggattcaaaattttatgaaccatttctttccatgcagtcatatcgcaaggacgttcttcaagacccaatttcttaatgacaatatcatcaagcccttgatcttgcatcatcaatggtacttcatagatggaatcacacgtttggttttcaattacggccgctggttctacatcgcagaacaatgccaacttttccttcatttcgtcggaaatatgtttttcactgcggcataccaaaatatctggttgaataccaataccgcgcaattcttttacgctatgttgggtaggttttgtttttaattcacctgctgcgttgatatatggtactaatgtaacgtgaatatacaatacatcgttacgacctacatcttttttgacttggcgaattgcttccataaatggcaagctttcaatatcgccgacagtaccaccgatttcagtgataactacatcagcattatcttctttacctacgcggtatacattttgtttaatttcatttgtaacgtgaggaataacttgtacagtgctacctaaatagtcacccttacgttctttattgataacggaccaatatactttaccagcagtaatattggaacgcttgctaagattaatatcgataaagcgttcatagtgacccaagtccaagtctgtttcagcaccatcatcggttacaaatacttcgccatgttggtaaggactcattgtaccaggatcgatattgatatatgggtcaaatttttgaatagttacattaaaaccacggtttttcaataatcggcccaaagatgcagctgtaatcccttttcccaaggaagaaactacgccgcctgttacgaaaatatacttagttgccatgatgcctcccacctactacattttttccggagcggaaatacctaaaatacctaagccttgacgaagtacaagggcaatcgctgtgattaacccaagacgagcttgttgcaatgatggatctacgccaatgatacgaccttgacgatagaaggaatggaacatgcttgccaaatcgaataagtaacgagcaatacgatgtggtgcacgatgttcggcagattgaacgacctcttctggatattcagctaattttttaatcaattctaattccatttcgcttgtaagcgttgtgaaatcagtttcactataatcaccaaatgcaatgcctgcttcacgcacttggttgtaaatgctgtgaatacgagcatgagcatattggatataatatactgggttatcattgctacgagatttagccaagttaatatcgaaatcaagttgactatctagagaacgcatcaggaagaaataacgagatgcatctacgccaacctcttcaatcaattcatctaatgtaacgctatcaccgctacgtttagataatttaacgagttgtccatcgcggaataacgctaccatttgtaacaataatactgttagtttatctggatcataaccaaaagcagccatagccgcttttacacggcatacataaccatgatgatcagcgccccaaatatcaatcatttctttgaagccacgatcatatttattgcgatgatatgcaatatctgctgccaaatacgtaggcacaccattgtcacggatgactacgcggtctttatcatcgccataatcagtggatttcaaccacaaagcgccattcttttcatacaccttgccaagagctttcaaagcctctacggagtgatgaatttcatcagtttcatgaaccgtacgttcagagaaccaattatcgaaagtaacacggaaattgcttaatgtttcctctaagcgagctaatttttcttttaatccctcttctttaaacaatgctacacgatcagcttcgttcatagcatttaatgtatcgaagccttcgcgttctgcaatagcttttgcagtctcgataatatcaggaccacggtagccattttcagggaatacgagagccccttctggaatatcgaattcaggcatagaaccatcttcgttgcgcttaggtgggaacactaatgtagcaccttgcaactcttggaaacggtactcaatggagatagccatattatcgatttggttacctgcatcattgatgtagtactcggattgtacattataacctgctgcacgtaacaagtttacaagtgcactaccatacgcagcaccacgaccatgaccgacatgtaacggacctgttgggttcgcacttacgtactctacttgaatcgtatcgcgtgcacgcaatggttgcacaccgtattgatcaccagcattcaagatagctttcaaggtatcatacaccatatcggattttaagaagaagttgataaaacctgcaccagctacttcagcacgttcaagccaatcaaaatccatatgactaatcaaagcctctgcaatagcacgagggttttgacgagccacacgagcggattgcatagcaatgttcgtagaaaaatcgccgaattccttttgaggtggcacttctagaacgatttctggatattccccagctggcaaaccaccactattaatcgtttcttgtaatgcctgttcaatccccgatttcaggatttccttcatgtccatgctctgtatcctcccgcacgtctatatctaactgattataaaattgccattcaccttctatggaaatatcatatccgagatgaacacgacccgttccattgtgaaagtctactgttaattcatgtgtttttacggccatgtgaagatcgcctaatggcgtttcatatgtggactggcgttcctcaccgcgaatatattgatgtcgcatattcacagcaccagtacgcaaaagaacaatggaatcttcgtaaatcttgatggtcgtcttaaccccttcaagacctgttacgctcgattcttcatagcgaatatattggactccgttcttttcatgtgaagtacctggagaaattaattccaccacggtatcctgcccatctatgtctcgttgtacactttttacggatactagaacccgcttcatgtttttctcctccatggtcataacatatcaatatattatagcacaaacaagggtcgttttgaatgttttgtacactctatttcaatagatttatacgttcaatttctctattctcacctgacgcaataagctgtaatttttgtatcctattgagtcttttaatagcatattctcgcgactgtgcctcttgtttactttgaaagctttcataataaaccaaatacactggtctacgacatttcgtatacttagccccaccttttataacgccattatgagcatccaaccgtttttttaaatccgttgtccacccgcaatacaagctttcatcagcacatctcacaatatacgtgaaaaattgttcatgattcatcttatttactagcgtcatccttaatcggctcaatggtaatcgaattaatgatcacaggatcaacaggcttatcatttttatctgtttttaccttaccaattttttcgaccacatccataccttgtacaactataccaaaaatggtgtgtttattatcgagatgaggcgtaggtcccaaggtaataaagaactgagaaccacctgtattcggtccacgatttgccatggcaagaatccccattttattaaaatgaaggtcattagaaaattcatctgaaatctcataaccagggccacctgcacctgtgcctgttgggtcgccaccttgaatcataaatccatcgataacacgatggaatgtaacgccattataaaagcctttttttacaaggtagtcaaagtttttaacagtaataggcgctttagagccatacaaacgaattttaatttgtccataatttgtatcaaaaacagcatattcatctgcaattggagcatttgtaaaattaggcatcttattaaccgtttcagcttgtgcaacaggtgtaatcgttttatctgcactattattgccacacgctgcggttactaccatcatgccccccaatagagcacaacctaatattcttttaacattcatgataatccctcacaaaatatagaatttccccaaattatatatacatagaaaaaccgctcaacccatgagcggctctttattagtatatcatgttttcactatgaatttctttaaaattctataaaaatttataatctaaatggtcttatgccaacgattaatcaatccatccgaaatgcttacatgcattgtaaataccatccttatcacagtcagttgtaacataattggcctctaatttaagctccggacgagcatttcccatggcaatgtttaaccactccggtctaaacatagacaaatcattatagccatcaccaaaaacgacaacttgatttggcttcatatcgaaatgtccgatcatattgcgaatccccaatgctttttccataggttcatataaaacgcacccatcgccatagcgaataagcttatgcgtcatatgctcgatatctttttcctcttcttcgccatctttgaaaaatacatagattttatagaaatcttctacactgtgaaagtcaaactctggatccactacggttttaaacacatcccaatcagggtgccattctaatatttctttatacggtgtaatgcgccccaatttattacggtctgttacagcccatgggatatgctttgactcaagatattctaaatattgaatacacatatctcgattcatgccaatcatagataccaatttcccatcaatggttatactatgacctccatcagcaactacattcgtaattctagcttgctcggcaaaacgcatagcatcgacttgtattctacctgttgcaatcgatactaaatggccacgccgttgcaattcatctatacagtactgagcactatctggaatttttccttccggccacacagccaatgtgttatcgatatcaaaaaagaaaaatttttgttccacaagtcctcctatctatcgctatatacgagttcatatacaaactataaactctacccggtaagcactattcatctcgtccactcattaattgaaagcgtttttgttgtttcacatcaggatatttatctcgatctacatcgctacaaaacatgcctaagggacgtacatacaaatcgcggtcatcatataatttttgatataccaccaatttttcacccgtttcagaatgtgtagccacatctaacacgtaataatacatacctttaaaatgacgatacaaaccaccttttacgatttcgttcataactacctcggcttactaaaaacgatctttcatttcttattaaacattatactaggaaatactatttgaaaaaagatttttatcactataaacaaaacactcgcatccccccttttcttttactgtaatccttctaagaaggactgagccaatagagtataaaaggagaatgcgagtaacattctacatttatttagttgtatctgaaaccaagcccttatgaataagacctatgataaagccaaggattgcaaaacttacccagcccataccaataccttggaacggaatatattgggtaaacaaaccttcgatggcatcaggtgcccaaccagcagtttcaagaccgctcattaaggcagaaatcatggtcaatccaatagtccaaccatatacgcaacgacgaccgccaaaaacagtatcacttaaggctaacaagataataacaatcgtcaacgggtacaataacatcaacactggaatagctgcactaatgattgttttcaatccgaacagcccaagtgcaaatgcagctacagagaatatgacaacatacattttatagctaattttgctatatagtttgtggaaatatgtactacaagaagtaataagaccaatacttgtactcaagcaagctaatagaacgatgatagccaaaataatttgaccagttcccccaaagaggaagtccgcactagctgttaacaccggtgcacctgtatcaaacaagccaaatcgctctacgcttgtagcgccgatgttcgcaatgaatatatacacaatgccgagtaatgctaccgcaatagcaccaacctccatcacagttttcgtaataacatcgcgagatgtagcacctgtaagacgtacaaaatcgatgacgagaatagcaaacaccacagaagccaatgcatccattgtattatagccatcgaggaagccttgcaatacggctgtaccattagtcgcgtaagctggttgaggcaccgcatatgccccaatcggtgtaacaaaagatttgataatcaataataaaataacaagcaataatgcaggtgtcaaaatattgccaatacgattaacaagcttttgaggactaatcgatagccacaaagaaacgccaaagaatatagcaaggaacagtggttgcatatccaaagtcatgccttgtaaaaatggcttgatcgcaatttcatacgcaacggtacccgttcttggtgtcgcaaacataggaccaatacttaaatataaggccactgtataaataagaccatatataggatgcgcacgacctgctagttcctcaacgtctttacatccggaatagcccatggccataacgccaagtaatggtaatcctacgccagttaatacgaaaccagctaatgcccatcctacattagaccctgcgtgttgacctaatgcggccgggaaaataagatttcccgcaccaaagaatagggcgaataacatcatgcctatggctaaataggcgcgcagtgatagattttcttttccatccataaggttatctcccttcgtactacactatcatattagataacattatatatgatatggtaatctggttcaacagtaaaatcgaattatatcgaactttcattacaccttacgaatattaacttgtacgtcatagaatgtactcccccatgcttcatcagtcggtctagatgcagttacagcattgattcctacctttgcgtcactggactgagattgccaccatacaccaagggtcacaagtgtacctcgttgtaccgtatcatctagatatactttaatacgaacagcccctcgattattataaatttccacagcatcactattattaatgttatataatgcagcatcatctggatgcattcgtagcttcatcaattcagaatcatcaaattctagttcacaaaaactagaatctaatatacgtatatcattaccgataatcaaccagaatggttcatcatcaccataaggttctgtataggtaatcaacggaatggattctcgaggatttaagatttcgattttgcccgacggcgttttaaaatccatcttataattgtctggcaatgctacttcaaccaagtcaccacgtaaaatggcatcttgttcgtcttgtgaaagtttagacgaattgcgaaccatatgctcaattagttctcgttctgtcatggcaaagaaaggatcatctaaacccatacgctgagcaagttcagaaataacttgccaattagatttcgattcaccaaccggaggaatagcttggtaactggccgcaattgtatagtgtccgtaagagttaaaaatatcatcggattcagcagagctcgtggctggtaagataatatctgcatatgcacatgtatctgtaaagaagcgttcatgcacaacggtaaataaatcatctctcataagaccttgtctaacgagattttgatttggtgctgttatagctggatttgatgaaaagatatatagactatgaacaggcaccccgccactagcatcctctaatccatgctctagaagcgcttttggatttgtcaacaaatcccctaataatatcatcggcatcatccgtttagacggcgttggtgtattaggttgttgcatgaatgatttattaaaatattggctactactggaactagataataagccgccacctaaatgttgccatgcacctaccacggcagggagtgcattgatacaccggcaactcattgctccattaccatagcgggatacaccactaccgagacggataaatggagcctttgcttttgcataggcatgagctagttcttctatgatttcaaccggtacaccacatatagaggaaacatattctggagtaaatgtaggcaatacatcgcgtactagctcatcataaccttgcacatatgcttgaataaatgtagtatcctcaagaccatcccgatgtatgatatgcatcataccaagtgctaatgcaccatcagaaccgggttttacatacacatgatgtgtgccttgatcataagtatatgttttatgggtatctataatccatacaaaagcgccgtttcgttttgctacattcacatcgtgtaatatatgtacatctgtagccgtcgcattaaggctccataatataatcaaatcactatgttgtgcttcttgtggtttgatagctactgtgtctccataaacagacttaaatgctgcttgtttcgcaggagaacaaatccctctgtcttgactagtagcgccaatacaacggaagaaataatccgctgcaggactatttacagcccccatggtccccgcataggaataacgaagaatactttcactaccataggtattaatagtatggttaaaattttctacaattcgcgctaaggcctcatcccatgaaatgggtgtaaattgatctggaccaataccttttttaccaattcggcgtaatggtgtcattaaacgtttaggcgaatgaataacacgctcataatgagccatcttaggacataatgtgccccgtgtgaaagcgtgctctttattaccgcgaacctttgtcactttattgtcatctactgtaagtataagtccacaagcatcaggacaatcatagggacatacacttttatattctttcatataagcacctcgcttattatcgtctctctagtaataataattctatatgtatatttatagtatcatacataagccactcaatctgtaataaaattaacgaatatcgatatttttcaaacttcgtatcaatgaatacattgtatatcaatgcatatagcaaaatcacttatcaaaataagtgtgtgatgttataacttttattaatgtataccatgtagatacacaataaatatcgatacttttcagtatttatttatagtttctcccctacaatacaaacagataagcaacgcataaaagtaccattttttacgttcaggaatgtatctattaccaaaagtcataatttataatttcaaggtattatcgattatttcagcgctttttgtcaacctgtgtaataaatttcacgtaagttatgcaaattatgtaatgtattaagttatgtaaaactattcaataactcaactttgtgtgctatactgacattgtcatttgagaggatatagaactcaccggacatcatatcacattcattgatataacggagtggagtcaactatatcaggtacatattttctgaaaagaggttttaacaatggcagacgcaaaaaacactgttcttttcccttatgaaacattgaaaaaattgagcatggatgctttccaaaaattcggtttctccgaaaaagaagctgacatcattcaagacgtacttttgacttccgacttgttcggtattcaaagccatggtatgcaacgtatggttcgttaccacaaaggtatcactaatggcttgatcaaaatcgacgcaaaacctgaaatcgtaaaagaaactccaatttccgcagttatcgacggtcatgatggcatgggccaattgttgggtcacaaagctatggaaatggctatcgaaaaagctaaaaaatccggtgttggtatcgtatccgtacgtaactccaaccactatggtatcgctggttactatgctaaaatggcatccgaccaaggcttaatcggtttctcttgtacaaactccgaagcaatcatggttcctgtatatgctcgtaaagctatgcttggttccaaccctatcgcttggactgtaccagctgatcctgttgacttcttcttcgattgctccactacagtagtaactcgtggtaaacttgaaatgtacaacaaaatgggcaaagctactccagatggttgggctgttaacaaagacggcgttccttccactgacgcagctgaagtattgggcaacatttcccgtcatgaaggcggcggtatccttcctttaggtggtgctacagaggttcttggcggccacaaaggttatggtaacggcatgattgctgaattgttctcctccatcctttcccaaggtggtacttccaataaatgtatggttggcggtaaatccaatatctgccacggcttcatggctatcaaccctgaattcttcggtgacccagctgaaatcaaaaaacacttctctcaattcttacaagaattacgtgaagctcctaaagctcaaggtcaagaccgcatctatactcatggcgaaaaagaacatgaatctgttgctaaagttaaagctgaaggcatccctgtacttaacggtacaatgcttgaagttcaagatctttgcaatgaattaggtttagacttcaaatcctacttcggcgattatgtaccagaagctcctgctacaatgttcaaaggtaactactaatatctaattagtgttggccctaacacggacatgtagttagtacagagggggacataaacactgtttatgtcccctctcttatatttttttaacctcataagctatgaggttaaaaaattttaagagatatatcactttttctgataagtatatctgttattttattgtaatcttttattattactgaacttttacaacttaatccaatagcgaattactcatcaattaaattgattattgctacatcgtcctgttaagcatatatttttatttttcttgaaaggatgattttagaaatgagtgctctcaccgttctattagcgctatctccaatcatttggttgatcgtagcgttatccatcttgaaattacctgcatggcaagcaacaagtgttgctgcaatcggttctttcatcatcgctattacagcattccaatccgacccatttattatggtcactggtgcccttgaaggtgccgcattggcaatttggccaatcttattagttattacagcagctatcttcgtttacaacttggtagtacatacgaaagctatggaaactattaaaacaatgctttcttctgtaacatctgatactcgtgtacttgcattattacttgcatggggctttggtgccttcatggaaggtatggctggcttcggtactgccgttgcaattcctgcagctatgatggttgccgtaggttttgacccactaaaatctatcattgcatgtctcgttgcaaactccgtaccaacaacattcggctccattggtatcccaacaactacattggcttccttaacaagccttgatccaagccatttaggtacattcatttccgtacaattattcttgcttaaccttatcgctcctttcttcgtagttatgattatcggtggcggtatcaaagcgttaaaaggcgtattccttgtaacattactttccggtttagcattagctattcctgaaactataatcaatgccgtaatgggtcctgaattatccgtaatttctgcatccatcgtaatcatggcagtgatcatcgcttgtgcaaaaattatgcctcctaatgatcctcaatacgcagttaaacaaactggcgaagttcctaaagtttctggtggcgaaggccttgtggctgcaatgccattcatcttaatcttcgtattattgttattaacttctaaattattccctgcaattaatggtcctcttgcatccattaaaacatctgtacctatttaccaaggtcctggtgcaaaaccttacacattcgtatggattgcaactcctggtatcatgattttcatcgctggtatcgttggtggtttcatccaaaaagcaaaagctggcgaaatcttcggtacattgggtagcacagttaaaaacttgaaattcacataccttacaatcatcacagttgttatgacagctaaattgatgacttactctggtatgactgcagatattgcgaaagcaatggttgctggtacaggttccttataccctctattcgctcctatcgtaggtgcattgggtgccttcttaacaggttccggtacaaactccaacgtattgtttggaccacttcaaatcgcagcagctcaaggcttaaaccctgttggttatgaagatcttggcttctggttagcagctgttaactccggtgcagctggtatcggcaaaatgttgtccccacaatccattgcaatttctattggtgccgtaggtcctgctttaaaagcatacttagaaaaccacaaagaagtcaatgcagaagaagctcacaaattagaacatgaaatcgaagcaagtgttatcatgaacagcgcgttcaaatacttcatcatcttcatcgtcatgcatggttgtatctccttcttcggtcaacatttcatccatgaaattcaccatatcttcttctaagaattggtaatataaaagaacagctcattcgtgagctgttctttttatttcaaatactaataagcaatacccttgttactcatttataaacctatagctttttcttattaaccatgttacaatacccttattaaatagataaaattaaatgcagtctgcgaagtgcgattcgcagacttttatttttcccttttttaatataggagattttatggagtctacaaagaaaatatctttattcattgtcgtatttctagggcttcttacggccatcacgccacttggtactgatttatatctaccagcattaccaatcatgcctcatgaacttaatacaaatgcgtccctcattcagatgacaattggtattatgacttttggtatcgctatcggtcaattgattggcggtcctcttagtgactcattggggcgaaaaaaaccactcatcattggcaatatcctctgtgtaatcgctagtatactctgtgctattgcgcccaatattgagattttactagttgcacgatttttacaaggtttaacaggttctatcggagttgttattgctaaggccatctcccgagattttgcatctggtaaagaattaatgcgactcatgtctctactgatgctcgtcaacggattagctcctgttattgcaccgcttataggtggtcagcttttattattttctacatggcgctttatttttattatcctcgccgttttctctgcagtgttacttatgggctctttcatttttactgaaagcctaccatcagaaaagcgtatttccggtggtatagcaacagcgtttaaaaactacggtgctctactaaaagataattctttcttaggccagactctagttcagctattcgcctttggtggtttctttgcctatatttcgggttcatcctttgtatatcaaaatatattcaatttatctgcccaagagtttagttatatgtttgggattaacagttgcggtattatcctcgctagcgtaatcagtgccaaagtaagtaatgttgtaaaaataagaaccattttacatactagtctattgcaattaacgattggttctatcctattcctttgtgcaatgtattttaattggtcctttattataactagtgtcattctgttctttacagtttgtaccgtatctgtatttggatcaacagggttctctatggcaatggcgaaatatggacacaaagcaggtagcgcctctgctattttaggatttgcaggcatgttttcagccgggttcgtatccccattagttggtattggtggaagtcatactggtatccctatggggattgttatggttgtatgtgctgtattagcattagtatgcttctatacaatgattaaagaagattcatcaatttcataaaaaagcgtccctcatatggcccctctttaccggttgctcagtaaagaggggccatatcactagggacgcttttttttatattcagaaattatataattgattattacattatcattcaaacattgttgctaacaacaatttcaatcgatttgcttggttaaccgcacttgaacctgggtcatagtcgatggctgcaatgcgcacatcaggatatgcttcggataatgtttttaccatgcctttaccactaacgtggttaggtaagcagccaaatggttgcaagcaaactacttgtttcgcacctttttcgataagatcaatcatatcacctgtaaggaaccaaccttcaccgcattgattaccaaggtcaatataatgagctgcttcttttgcaaccttcgtcatccgttgcaatggatcaaaatgcttagatgctgcaacggcttttgcatatggcaaacggtataattctaacgcttcgcgagccaaggatccaaagaatccggaaagccatgtaccatctaagtgtttagcacgatatgtactatccatagcacagtacaagaaaaagtctagtagaccagaggttacaacctcgccaccttccttctctataagttcattaatatggttgttcgcacttggatggaatttaacgtagatttcacctaccacgccaacacgaggtttcggcttagatttatcgactggtaaattgtcaaagtcttcaatgatgttcttaatatatttactatattggaatatattagcttttgtaatacgttcccgtaattttttaacccaataatcgcacaatgcatctgcagatcctggattaatttcataagggcgcgtagccaatacacattgcatcaacgcatcgccgtatactacagcttgaatcatgcgatgtaagaaggatttagtcaatttaaagcctggttgacgttccatatcactcgcattaagtgacaagattggaacttgtttcatacctgcatcgatgagggctttacgcaaataaccaatatagttggtagcacgacaaccgccaccggtttgagagataataacagctgttttattaacatcgtatttaccagacaataaggcgctcatcaattggcctacaacgatgatagcaggataacatgcatcattattgatatattttagacctatctctacatcttcacgcgtaggtgctggtaacatgtcaaagtcataaccttcagacttaagcactggctccaatagttggaaatgaagaggtgacatttgaggcaccaaaatcttatagctcttacgcatttcttcagtaaagacaacacgttcataatcataggctggtgtatcatcaataacagtctctataggagcttctggattatggtgtttacgcatactccgttccattacggattgcaaggaacgtaagcgaatagtgacagcgcctaagtttgtaccttcatcaattttaagcaatgtatgaatcttatgctttgcagataagatatcctttacttggtctgccacaatggaatcaagaccacaaccgaaagagttcaactcaacaatttggaagccttccgtacgacttacaaattcggctgcatgatatagacgactatggtatgaccattgatctacaacgcgaagatgtttaatatccttacctaatggtgctacaccatcttcggtaagaaccgccataccaagagaggtaatgagctcagggataccatgattaataccggagtctaagtgatatggacgaccagccagtacgatggtaggcacttgttctgctacgagacgagatacagttttctttgtcatctcgcgatagtcagccttacatttttcttgttcggcccaagcagtctcaacggcattagaaatttcagatttagagaatggtaactcttttaaggctttcaccaaagcaagcaccaatgatttcttatctgctagtggtaagaatggcgcataaaatggcgtttttcccatcacatcttgcatattgtttcgaatcaattctgggtaagaaataaccataggacaatggtaattattgtcgcggctaaattcctttggaccatgttgaatacatgggtaccagattaaatcaacttgggcttgggcaagatcacgaatatgaccatgaacagccttagcaggataacacgctgtatcggaaggaatcgtatcaattgctttattatattgatccttcgtcgtataatctgacaataccacttcgcagcctaattgattgaagaatgtaaaccagaacggaaaatcttcgtacatattgaggacgcgaggaataccaatacgcaatttaccttcaaactcaggaatatttttcttgaggaagtaatcaaaataacggcgtaattttatgtctaccatatttggaacaggcttatgtttctcttgaatcatatcaccggcaccacggtcgcaacgattacccgttacataggtacggccatcggagaacgcattgatggtaagcatacaattattagagcacaatccgcaattacgcatggatgtagatacttgcaaggatttcaaaccgtcactatcaagcaatgtgctatgttgattttgtaactcttctgccgcttcagaagcgagcaatgccataccataagcccccatcaagccggatacatcagggcgaattacttcgacgcccattaatttttcaaaggcacgaagcaccgcttcattataaaatgtaccgccttgtacgacgatgtggtcacctaattccttaggatcttttaccttaagcaccttatacaatgcattcttgataacagaatatgcaaggccagcggcgatatccggtacagtagccccttctttttgcgcctgttttaccttggaattcataaatacggtacagcgagaccccaagtcgattggcataggtgccaataaaccttccttggcaaattgctcaatcggcaaacgcaaggatgtagcaaaggtatcaataaaggaaccacaaccagaggagcaggcttcattcaatactatgtcttcaatgtatccatcgcgtacctttgtacatttcatatcttgaccgccaatatccaagatgaaggatacatcagggcagaagaattgagcagcacgataatgggcaattgtttctacttccccaatatcgataccaagagctcgtttcaagaaggcttcgccatatccagttacaccagaatgagcgatgtaagccccttttggcaataagctatagattttctctattagttcttgggatttttctaatggtttaccatgatttgggccatagtgagagaagatgatttcattcttgctattgatcaagacgactttcaacgtcgtagaacccgcatcgataccgaggtaacatggaccttcagcatctttaatatcacccttcggtgttaccgccttagcatgacgtgcacggaattcttctaattccgcttcatttctaaatagcggatccacacgatcggttgcttccattggtacaccaataagcgcaccgatttccttcgtcaattcacctactgtaatatcacgacattcatcattcatgagagctgcgcctagggcaataaacaactcaccattttcagggatgatacgatgtgcttcatcgagttctaaggtgtcacagaagcattgacgtaattcggataagaatgtcaatggaccaccgaggaaggctacattcccttcaattttatgaccacatgcaaggcctgcaatcgtttggttaacgatggcttgaaatacggactttgcaatattttcatgagatgcgccttgatttagcaatgcttgtacgtctgttttcgcaaatacaccacaacgagcggcaattgggtaaatagtatccgcattcatcgccaattgattaaggccggatgcatccgtttgcaataatgttgccatttgatctatgaaagcacctgtaccaccggcacaagaaccattcatgcgatgttctgcagtacgacctagatacgtaaccttagcatcttcaccaccaagttcgataataacatcagtttgtgggtacaacgcttttatcgcctttgtttcggcaattacttcttgtacaaaaggtatacgcaccttatcagccatcgccataccgccagaacctgtaattgctacatgtacttttgcttcttcatagcccacttgagcctcttgtagcaatgtatgaacagtatccaaaatattggcgtaatgtcggatatattttttatacaaataattatcttgttcgtccaacaaaacgaccttgaccgttgtagagccaacatcgatccccatacgtaaggatttttgcatatatacctctcttgaaaaaatgaagaattagtacgctcgcaccatttttcttcatacatttaagtaaaagttaaataataaagcttttaactacacatctaaaaaattaaatattaaatatattatacaacaaacagagattaattctaggtttttccatattccaatgtggtatatagaacatgactattcctaataaaatatatataactctatatgtcgtgtattttttattataccacttcaaagtgaaaaatattgtacgtaaagatacattctaaaattaatatggttagttattacttatttatatatctaaatatatcgaattgtctttttatttataaataattttagtctataatgttataataactattaatgagtcatatatttcattaactgtaattgatttatccattagtatggatcatgtaggagacctatggaactgacagacattcaaattcctagcgatttgcgcgactgttctctcacagaactcgaggtcatcgcacaacatatacgcaatttaattatccatagaacatcacacattggcggtcacattggttcatctttaggagccactgatattattgttgccttgcatcatgtgttcagccctgatgatgctcaatttatatttgatatttcccatcaaagttatgctcataaaattttaacaggccgttacgaaggctttaaaaataaaaacaaatttcacaccgtatccggttatagcaatcctgatgaaagcacctacgacgcatttcacttaggccatgcttccacaagcctcagtttagcatgtggcctcatgattggacgcgatttacagcataaaacgcatccaattattacgttaatcggcgacggagctctctctggtggcgaggcttatgaagcattaaatcacttagccacaatgtcctctcaatgtttgattatcatcaacgacaacgaccaatctattgcagaaaatcacggcggtttgtatagccatcttcaacaattacgcgaaactaatggtgaaagccctaataatatctttaaagctctaggattttcatatcgttacgtcgacgatggcaattcgttgccaaccgtaattaaggctttaaaagaatgtaaagcagagacaacaccgatagtgctccacatccatacgacaaagggctacggttacaacaaggctattaccaatcctgaaagctttcataatccatccggatttgatattgacacaggggaaacaaaaaagcgctataccaacagctacgaatctatcgttgcaaaacaactcattgatgcactggagcaaaacaaagctgcatgtatcgttacagctgctacgcctggcggtttctgtttaaccaaagatatacgtgaaagattaggtgctcaatacatcgacgtaggcattgcagaggaacatgctacaacattacttgctggcattgcccacaacggtggcacgccgattttaccgatttacagtacatttttacaacgtgcctatgatcaaattattaatgacctatgtattaataatagcaatgcactgatccttgtatatcgcgcgtccatttatggtaataaggatatgacccaccttggattcaacgatattactatgctcagcaacatgccaaatctcatgtacctagcacctacaacagtagaggaattagaatctttcattcgttatggagtagaacatcacaatcatcctatcgccatccgtattcctgtaggatcaccgatttacgaaactagtcaatccaatacaacaggatgtcctgtaacgtcgtgtaacataacccaatcaggtaatacgattgccatcataggtgtcggtaatttctaccataaggcggtcgaacttagccacgcaatacatgatgccattcatatctttccgacgcttgtcaaaccactttgtatttctagtttagacactgatacattgaatgaattaacaaagaaccacaatatcgtcatcaccttagaggacggcgaactcgaaggtggctatggtcaaaaaattgctagctattatggaaaaacgtccatgaacgtcttaaactatggcatttccaaacaattctacgaccgatacaatccagaagatgtattacaacaaaatcacctagattttgaacacattttagatgatatacaaaacatacaacattaattcaatacatatatgtcaaaaaggggctgtaacaaaacagccccttttcgtatctatagaatttgtcatgagaaggtattgtatcagatacatatattattaacgatcaattagaacgctgggatgatagctcccttatagagttgacgttgtttgctcgatagaaatagttacaggtgctgataatttagcctctaaccaagcttttattcgttccaaatctgcatcagatatagtggatgtagtatggattatcaccatatagcgactcgctttaggctgttctagattatctattaaaggcatgccttccactttgcttacaaacgggaataacgcctttgcttcagcttctgtcgttttcatagtctttatagtttcacttactaattgataagtcggctggtatagattgctcaagtttttatatgtttcaagattctctgaagatttattcaagttcgtcttatccatagtagattttttctcatctacgctattaacaaatcgtaatgtataattctgcaagtactcatccttatgtaacttgtcatccaactgggcttgctcctctgaagtcacaggagctcctataactactatgtctactagcttattcgtttgatccaatgaataatcaatcacttgtcgacgtccctcttgattaatatcattcttaataaactgctccatatgatttgactcagaatacttgatggtcatatcatagcccgcataaatacttggtatagccataataagaccaatcacgagaaatatcagctggttacgacgattaacctcttctgcttgtttatggaatggcaaactatatacaccctttaaaacaataaaagatgcaaagaagatgaagaatgcatttataaagaataaatagctagccccaaagaaatagttccaatttccattagcaagtccatatcctgccgtacatagtggtggcataagtgcagtcgcaatcgcaacacctggtataacattatctaaggtcttacgcgtttgcccaataatcccagctaacccaccaaatatagcaatgaatacatcaaaaatattcggttctgtacgcgctaatagttcagatgtagccgtctgaacgggagaaatataaaaatataaagcagatgccaaaacagcaatcgtaatctgtaaggacaatcttaaaataccgcttttcacaactgtaaaattaagcgtagcgaagccaaaaccagttgctaaaataggtcccatcaacggcgatataagcatagcaccaataacaactgccgtactattcatgttcaacccaatagaggcaataaacatggagaggatcaggataaccaaagcaggtcccttaatcttagcaccacctatcagtcttttggcgatagttgcatcatcagctcgctcaaaatgtatatcaaagtatttatttattttcattcgtcctccttataatttcatcaaatctgcaaaggtccctacgtttacaaacatatgctgtgtagttttcaacatttgaaccattaagatagctcctgtcccttcccccatcgacatgtgggcttgaataggaaccatgtcttgtgtaatatctacctctgctaaagctagctctgtgcctttttctcgagagttatgagatggcaatgcataatccttaacacgatcattcatatgtaccgcacaagctgctgatacagctgtaataaagccatcaatgacgaagggctttttaaactcaacacaagcgagcatagccccaagaatagcagcaatatcaaagccccctacatgggctacgattttacgaactctttcaacttcactgtcagaaacgatactagtcttatgcttatctaatacagcgcgcacaaaatcaatttttcgtttcatcaaatctggtttattcggccaagaaccagggcctactgtttcagtgggatccgctccagttaaggcagacaacacacaggcagaggtcgtcgtattaccgagtcccatttcaccaaaggaaaaaagatttatcccttgctttacataatgttcaactcgtccatagccagcttgaaaggcactattaaattcatcctcactcatagcaggatggtttaatatattctttgtcccctttgcgaccttgcgatccactccgatgccatcatctgaggcaattcctacatccacaacttcataaggaatattgttaaagttacaaaactgtgtagccgacgaacgacccaagagcatattacgcgactgcttttgcgttacctcatagttataacctacataaccttccatattgcacccattatcggcggaaaatatgatgtgctgaggtctaatttcactatcgatacggccccaagccgtacaaatcttacgaaaataggtttcccataaaccaaggccaccaggtattaggcacttaggttggaggaatttattcaattctttatcaaatgaagttatttcgttatctttcattttatatagtattaccttgtcgatataaatctaagaaatttttgaggactcgacctgttaatccccatatcgtatattgcttatagggataaaaataaacagaatagttctgccgaattttccaatctatttgatacccttctaataaatggaacggaaaatctcgtaatggtttagttccgatatctaagtgccctaccgttggttccatattcaataaatacgaaagtggtaccgtaaaaatttcaccgacctcatcaatattagggcgaaattcatccgtatgtaaacgtaccgccactgcatgtaatttaacaccaatggcagatactaaacaatctaatgagcctaacaattcaatttgctctgtatctatccctaattcttccgagcattcacgaatagccgcagcagctccagttttatcggtgctttcacaatgtccaccaggaaagctaatttcaccaggctgtctacgtaaggtctgactacgcaccgtaaataggacgtgatcctcaccatcaatttcaagcaatggcactgctaccgctgcagttataacatcaatatctgtagccacttgtggttctcgtccatttaaatatgcacttaattgtctatccatagtcatcccccttttcttaattataccaagaatcgttttccagaaaatagtacaaatggcacaatttataatctatgatttgaagacgaaaataggttacctcacatacaagaggtaacctatatatatattatacttttattaagtacaatctacgcaccttggaattgaggcatgtcatcatgagagtcaggatcgtctaatgtacctttcaaatcattatcaaccatagcacatacagatgcatcggaccaaacgttttcagccgtttcaatcatgtcgataattgtatagattggtaagataataccaagcaaaccgattggcgcgccaatggaactcatcaaggacaatgttaaaaagtaacagcccattggaacaccggcattaccaatcgcagcaagaacagcaatgaataaccaagcaatcattgtacccatagttaattcaatacctgcattttgcattacaaataaggatgtaacaaggataaacgctgcgcaaccattcatattaatagttgtacaaattggtaacacgaaacgcgctacagaaggatgggctttcaaattgtcttctgcagatgccaatgtaacaggcaatgtagcagcagaagatttcgtaaacaatgcaacagctacggctggagacattttgcggaatacatcgagagggtttaaaccacggaataacaagaacaatggaattacaataaagaattgaatcaagttgccgccgattacaacagctgtatatttacctaatgcaccaacgatgacccctgcttcgatttgtgcagataattgacctgcaaaagcaaggataccgattggtaaaacgtaaagtaaacctctaatcaatgtgaatagtaattcttgtaaaccaaataacaccttcaatactgcttcacgaccttctgtacgaggcatgaaagcaaaagctaaaccaacagaagcagaaatgaacataacggacaatacgttaccttctaaatacggtttcaaaatattgttaggaataacggataagaaatgatcataatatgttacgtgacctaatttttcaggtacttgcgctgcaccggcaccgattacatcaagtggtaagttacctggcgcaatccaaaggaataaaccaagaccaacagcggctgcacaaattgttgttaacaatgtataggtgacagcatgaccaaagatacggcctgtatccttcttagcacccaacatggacaatgtggtaataaccgctagtgatacagtaggtattgcaataaattggaataaatgcgtaaatactgcagcaatgaaattaaataaatcattaagaactggaatatgttgccatcctaagatagcgccgataatgagcgcacccatccataatataaattgacgtaatttaccttgaccacgacttttcaaggtaatctcttgcgctaaggcatcaacatttttgttgttttgatctgccataaaaacacctctcaactaataaaactactagagactaataaataaatcccagcccttggggctgggataattgtcacatccgagtctctttataaaacccattataaagatatgttttaaaattgtcaaaccaaataatttgatatacagattaatatattcaattaatgcgtcactataaaatcatagaagacaacacgagtacgatcagggctaaacaaaaaataaatcacatacgaatcaagtccactctctcggtgcataacataaaccgtatagccataggtaggaacttgttcaagttgataatatccacctgctaattgacgaccatatagaagccacacaaataagttccactttgtataatcttcaattaaaaggtcataagtgctttgtatatccccttttgaaaaaatagagtctgccacagacttatatgtgccctccttaaataactccggtgtaataactacgccaggtgctgaggattcggcaacagttttctcaaattcttttacaacttctcggttaccttcaaaaacaatagtggttgtgaaatcataaaaactttctattgttccccttgaagatataggatgcaatcctttcggcactatatcagggtctctaaaatgatctggtaatactgttgcatttactggccatctttgtttccatcgtgatacatcattaacttcacttccaaaaagaatctcatatataaacatagacattaataataaaggtactgctacaaccaatgtgcaccaagcatataaaatgtgtttcttcggtaatgttaaatgataaaagtagtaataaaactgtattcttattgatagtactaagattacacctacaattacaaaccatagtcctggcaattgaacatgtgcatttccccaagaaaaaaaggcaaagaatacgattgatagaataatatgtttaccacaaggagggcctattagcatttgtaaaagtttaataaatcgattcacaatatataatccttacttagactgataaaacacagcccgtgtcccatcattactgatcaaaagttccacgaaatgaggtcttttagtattcccatcgtctacaaagacatatagtctatgattttcagtagaattatatgtgtacttcaccacttttttcgtttcttttcgaggagcaaagcgtaaccactctataaaactccgttgtggtaagtttagaggttcttcctcgatgctctctataatgttatagctattgggatgagatataagacgctttttctccccagtgtctaaatcacgcaatacaccatccgcatcaatttgtgcttgatacacagtgtgttccttagcaatctcctcatactgtgcaataactgtaggatttccttctaatacagtatatcttgtaggatatgcatttgcccacgctaagctatcgccagatgcagaggcctttgaaataccttcaggaaggttcttagggcgctttagaccttccggcaacccgtcatcatttggccaacctcgttgccagtccatagtactaaactcaaatccatcggtttgttcaagagtcgtttgagtatcgtacttaagccaatccgcaacaagtccagctaaacataaattaaatataataaatacgcagcaaatcaatttaatatgtgttttttcagataaagcatgtttcttataccagtcatattgtagtactaaaagcaatactattgctacgccaaatacaatatatgttataggtgctatattaaatagcattgccacaataaatagcataattatatatgcagttaataggccataaaatatgcgaaccaaaactctctccctatatttctatgactacaacattttcttatatagcacttctatatcgttacggctcacttcagccactgtattcgcaatatttcctgtagctacaacgtatacattatccacgagccatggaatgtcttttttcgtaaatcctaattctgtaaggtttgtagtaaggtctaggtcatgtacgattaggcgtaatgcttcacccagcttagaaccatcaccatggttgaatatacgtgccaatgagttgaatttttcagggttagcactccatgtgtattccactacaacaggttcaataactgcaagaccaacaccatgggtaatatctttaaggccactagcagggtgttccataccatgaccaagtgtgacgcctgctgtattgataaccataccgccaatagtgctagccaatgtaacggactcccatgcttttgttaattgttttttgttaagtacagcttcttgaccattcgcaatcgctttcacatgtttatatagaggtacaagatattgtgctagtaatgttactgcataatgagctagtgcatcggtgaaaggttgcgccgttttagatgtgtacgcctcgatgttatggcacaatgcatcgaaaccaacagatgccaacacatgaggaggcatagtccccattacagcagggtccacgatagataccttaggcacgatggcattacagcgtaaagatttcttatcccctgtttcagggttcgtgaggacaccaaagccattaccttcagaacctgtgccacaagtggttggaatcacaataagcggtaacgcattatcactcgttttacggttaaagatataatcattaatgtcgccgtcattcaccgccataaaagcaatgccctttgcacaatccataatggatccaccgccgatggcaataaccatatcacagctttcagatttagctaacgcagcgccgtctaaggcagtcgtagtcaatggattggcatccacttgatcaaagagaacatgttcaatatgggccgcatcaagcttagctactacgcggtcatataaaccagattttttagcactagtacgaccagttacaataagtgctttcttgccatacggtgcagcaaaaccagcaacattatctactttattccaaccgaattgaatgtttacaggtaaaaaataagagaattccatgtgataacctcttttctttgaaaactagttcttagtgttattgtaaaggatatttacaagcatgtaaaacctcatagggctttcaccagaaaacaggtatactaataataagaggggaggatttatatttatagagggagagaacatctatgaaatttgctattaaacatgtatggtcttcgctgcgagacctagcaacgcagtcgcctatattactggcattaattgccatattttcatgtacaccgttgtatattgaacaagattggtttgccgaaatcgatattaagctatactcactgtatttctttatcgttatattacaaagctatataacaagaatccgaaagttttccattttatataccttagtaagtatcggaatcagcgttggcctttatatgattcacgaaagctacggctatgtgcgaggtattgaactggctacggaaaatatatcgtacctatggctatactccatgattgccttgtatttcacatcgcctggtgaacactacattggtgaaatcattaaccgcatcaaacggattggcatcacccttgttacgtctacgctatataacattgttatcatcatgagtttatggttcttcttcatcatcgtggaccaaccattcaactttgaagaaaccatttttaaggtactcgcatccattaatctattcatttgtctatctatggtatgttcttacaaagaggatcccgcaggtcctccagcaccaaactcattttttactgttgtattcggcatcatcttgcctaaggcgtccattattacaggcattctagctaatatctatttggtcttgatcctgttagggcttcgagaggatacgcgtttcttctacacctattatccgtatgtagccattttctacctattctacttggctagctttcgatctagtgaaagtagcagaacacagcaaatcctatgcttcttgttcattacgctaactacactgtgcttagctcttatcggtaaacgtgtgattaatgaaccaattctctggctcaatacgatttacgtgagtgcattcaatttaatcttcttagtacacaatgtatactctctagtgaaagttttaaaaccttctgtacacacaaccgttatggctcttgccttaggtgctgttctcttgacaccattcataggctatacaacgtatcgtgaatttgtgacctatactaaagttgatggagaatggcatgcaagcctaccaatagcatccacttttgatcctaacttcacagactacggcacaccatatgtccctgtagatgatttaaaactgccagataccaacccaataaacggcaaacgagttgaatatattaattttgatgctataactgcaccaaaggttatttcgattgcaggatacgataaatacattgaaaacatcgagttaattgtatacgaacaagatcttaaggaataccaagtggaatctgctaacttcgactccatcgccttcaaattcctcaacaaaggccttgatttagaggtatctctaccaaatggagtaacagaggtgcatcatatttatgataagttccttacagtcgataaaacagctgtcgatcctatcattatagaaggcaatggatataagctattgattacgtcgtacttcataaaccaattcgatacgcgtaaacttaaatttaatgtactttataattaagcatataatacaatatagtaataattacaacatcatatataatatgacaaaagcagtaccccggaaagggtactgcttttattcatcgatctaacttgactagaatatgttgggcaaagtcttgggccgctttaaaatcgtcttcatttgggtgtactgcagcttgtttgtgacgtgcatcgcgatcagcagattgaccgtggctatgccctttcgggaacatcttgtacatcatttcgataaccttaggatctaccttgccttggcagataaaggttcctacaggctctacgccatcgggtaaacaatttgctgcattgattaaactttcctttgcatgtgccatttgcggtggtacgccagctgtagcaaacagagcaatatgagggttatgtaatgtgcctagtacatcacgggcctctttattagctgtccctttatcaacccaaaatccggcaaacaccagatcataggatgccatatctgagggtagttccgacatagatacacatggtgtgtccgctggcaatactctggcaatggtctctgccacttgttttgtatttcccgtaagggacgaatatataacgatagatttcatagctaacctcctattgtaaagctatatttattataaatcatatagtatctatctataataaaattaatcacaaactacatcgataaatttaatctaaccacattgataaatttaaaaaagtcaatattgaatatatagatttttttcgctataatcattacataatgtatttaataaataagaaaactaccatatattgtagttttcttatttttctgattagaactagtttaaaagagtacatctgatttacgctagctctatagatgattttacatagatttacaatgtaaggggaaccataatggagattatgatcaagaaacgggatggccattttgaaccgctatccgttgaaaaaacgaaacgcatgattgccttcgcatgtttggggttagattcttgtgatccactagaattggaaatggatgcgaagttacaattcgttgatggcatgacaactaaagaaattcaaaaaacgttagtacaaacagctatcgaaaaggttatcgctaaaaaagacgacggtttcggcaaccaagttaataaaatgaaccaagattggcagtttgttgcagctcgcctcttcttgttcgatctctataaagaagcagctatcactcgtcgttataaagcattcggttatggcaacttcccaaatcttgtacatatgcttgtagaagagaaaaaatacgctgacttcttcgttacagaatatacagctgacgaattgcaagagttaggcgattacatcaaacctaagcgcgactacctcttcaactatgaaggtcttaaattattggctgaccgttacttggtaaaaggcttcaacaaagaaatctttgaattgccacaagaacgcttcatggctatagcaatgcacttggcattggtagagggagaaaacaaagtagaatacgctaaaaaattctacgatttgatgagccagttaaaaatgacaacagctacacctacattggcaaatgcaggtacaccattccatcagttgtcctcttgctttatctctggtgtagatgataacttatggtccatttacgacgtaaacagcaagttctcccgcgtatctaaacacggtggtgctcttggtatctatcttggtaaagttcgcgcattgaactccgacatccgcggtttcaaaaactcctctggtggcgttattccttggattcgtttgtacaacgatacagctgttgcagtagaccaattgggtaaacgtaaaggcggcgccacagtaacacttgatatttggcacaaagacttctacgaattcgtagagcttcgtacaaacaatggtgacgaccgtcgtaaagcacacgatatcttccctgctatctctgttccaaacatcttcatggaacgcatgattgctcgtgaaaacttcaccctcttcgaccctcatgaaatcttggctgtaaaaggctatgctctagaggacttctacgacacagacgataacaaagagttcacaaaacgttaccttgaatgtgaacaagatccaaacttgcacggcatcgaagtaccagcactagacatgatgaaaaaaatcatgcgctctgctgttgaaactggtacaccattcatcttcttccgcgacactgtaaacgctgcaaaccctaacaaacatgcaggtatgatttacgcatctaacttgtgccacgaaatcgcacaaaacgttggcttcacaaaccttgctgaagaaatcatcaacgaagacggcaccatcactacgaaaacaaatacaggcgacatggttacatgtaacttaaactccatcagccttggccgtatttctgacgaagaattggaagaaaacattgctcttcaaattcgtatgttagacaatgttatttccatcaaccaagcaccagtaccagaatctcgcatgacttctgataaataccgtgctattggtcttggtacttctggttaccaccactaccttgtaaaccacgatatccaatgggagtctgatgagcacatcgaagcagcggacaaactatttgaaaacattgcatactatgccatcaaagcttccatggaattggcgaaagaaaaaggtgcatacccagcgttcaaaggttccgaatgggaaactggtgaatacttcacgcgtcgtggctacacatccgatcgttggaaacaattggcttcaaatgttgcaaaatacggcatccgcaatggttacttgatggccgtagcgcctacaggttctacttccaatattgcgaacacaacggctggtatcgaccctatcttcaaaaaattcttcatcgaagagaagaaaggttctttcactccaaaaactgcaccagatttgaacgataaaactttctggctctacaaagaggcgcatacaatcgaccaacaatggtctatcaaagcttgtggcgtacgtcaacgtcatattgaccaagcacaatctttcaacttgtatatcacacctcaaatgaaagcaaaagaaattctagacctttacgttgaggcatacaaacaagggattaaaacaatctactacatccgtaaccaatcccttgaaatggacgaatgcactagctgctcttcatagaaacagaatagtcttcacagataatataaaggagtcccctatggataaaaaactaattttcaacgaacacggtgaacgtggcacgcaatctatgattggtggcaacaccacaaaccttcgcgaatggaaccgtatcaagtacgactgggcgaaccaaatgtaccgcacaatgctcaacaacttctggattcctgaagagatttccttgaacgaagacgttaagcaattcccatacttaacagattacgaacgccgtgcattcgacaaaattattgcattcttgaacttccttgattctattcaatctgaaaacttgcctaacttgagccgttatattacagcatctgaagtggcatctttattgaatatacaagcattccaagaagaaattcacgctcaaagttattcctacattttggacactgtaacaaatcctattacacgtgacaaaatttatgacgaatggcgtacagataaaacattacttgaacgtaatcgattcatcgccgatgcataccaacgtttcagtgatgatcctagcgaagcaaacctcattcacacaatcatcgccaactatatcttagaaggtatttacttctactctggctttagcttcttctacacattggcacgccaaggtaaaatgacagctacatccactattttcaaatacatcaaccgagacgaagtaactcatcttgtattgttccaaaacatcatccgcgaattacgtcgtgaacgccctgacttgttcacgcctgaactggaagcgaaaatcactgacatgattcgccaaggtgcagaaaatgaaatcgcttggggtcaatacatcactgatgataaaatcctcggccttaacaacgttcttattgaacgctacatcaaataccttgccaatatccgtttagaagcaatcggcttgcctcatctatatcctgaaatcaaggacaatccaatggaatggattgaaagcttctccaacttaaacagcacaaaaactgatttcttcgaagcaaaagttacaaactatacaaaagcagcagcatttgattttgatgatttagaatagataaaacttacatataaataaaaggagtgctttcacaacaaatctgtgaaaacactcctttttatagtccccaacgccaccctcatcaaaatagttgacacatggtaatacattataaaaaataaccatacatttatacgcaataagggcctacacgatacatatcatcaacgccccgtacatgtaatggaatatcatctttttacgaattaagcaatcgtggctttgtatccaccctatcttgattaccaacttatacttaatactctattaaatcaaccgtccaattagttgactgtagtaaattatctaatgtacgaatctccttagatattgtatctgctgttttttgtaattcactaacatttacagttgctatcattttgatttccgatccacgagcacgataattaatcgcactcgcactatctgctaaggcacgatatgcagaaagtcgcataatagctccttctttctctgctataatttgcgttaaagagcgcccttcaacaatagttgcacagttagtaagattaatatctttaatgagttgttgaagtcttgcaattgctgcttctagttcttgcatcaatacgttagggtcttcattaggtatttccccttcttgtactaaactattttgatttaaacgaccttgcaaatcgctaattttcttattcaaatcagcacgttcttgtaatgcttctgctagtttcataaactctcacctcatattttaaaatatatagatattaatatactgaccgagctaatacaaactattatatttagtatctagtttcttataatactttccgcatcatcacatgtgggcagccttcatctagatattcttcaccttcagccacatatccaagagattcgtagaatggttttgcctgtacttgcgctgatagagaacatgttttaaatccatcgcgacggattccattttccgcagcaagcatgatttttgatcccaaattctgaccacgatataatttgcgtactgccatacgaccaatatgagcatccccttctatatcgctggggaaaaatctacaagtaccaacagcttttccatctatagataaaagcacgaattttgcattttcatcaatttcatcaaattcattctcgaaaccttgttctttcataaacacatctgtacgaatttgtttaatatcatcgttaattgtatttaaaatttgaataatcataactctccttaccaattatgttctataacgtttatattgctagcattttctatctttaattttaccatgtggataaaggcaaaggaatattaaaacaacttttttctatagaattttgcaattttttgaaaaaagtacttgcataaaattctcaaatgggtttatactgtacacatcaaatttagaaaggagcaacaataagatgactaaccaaattagcacagtagcaaaacaatacttttattggttctttatccaacgtacgggtaaggaactatttgagctacgctaatttagaaatcatcaatcgttgcttagaatagtaaaagggttacccgtattagaatacgggtagcccttttttatttgctatcccgtatggttggccccactattcgcattgttatttgaggaggacttattatgattatcacgttaaaaacaacagctacagaagcagaggtaacaaaattacgcaatgaattagaagcgaaaggtcttgttatccatccagtagaaggggcccactataatatcttaggtcttatcggcgatacagcatccctcgattcccgtcaaatcgaatctcttgatttcgtagataaagtaactcgtattcaagaaccatacaaaaaagcaaaccgtaaattccatccagatgattctgtaatcaacgtaggtggtgcacttatcggtggtggtcacttcgcagtaatggctggtccttgctccgttgaaacacctgaacaagtattagaaacagcaaaagcttgtaaagaagctggtgccacaatccttcgcggcggagctttcaaaccacgtacttctccatactccttccaaggtatgggtccagaaggtttggaactgttagagctagctaaaaaagaaactggtcttcctatcgtttccgaagttatggatatttcccaattacaatacttcgataatgtagatatgcttcaaatcggcgctcgtaacatgcaaaacttcacacttttaaaagaagtaggtaaattaaacaaaccagttctcttaaaacgtggtttgtctgctacatacgaagaatggttgatggctgctgaatacatcatgtcagaaggcaatgaacaagttgtattatgcgaacgtggtattcgcacattcgaaactaaaactcgtaatacattagacgtgacagcaattcctatgatgcacgaattatctcacttaccaatcatcatggaccctagccacgctgcaggtatgagccgcatggttcgtccactttcccttgcatccgtaggtggcggtgcagacggccttatgatcgaagttcacaacgatccatccaaagcattgtgcgacggccctcaagcattacgtccagaccaattcactagccttatgaaagaaattatcgcattgcgccaagcactggtagaatgcactaaataatcttaaatagcacacaaataagctagtatccgttataataggtactagcttattcttttatgaaaggaactgttatgactcgcattcatattaacgcgtccacaccgtatgacgttgtcatcgaaaacggtgctttacaacgcatcagcgattatataaaaccattaaaaccaaattgtcgtgttatcatcgtcagcgacagcaatgtagcaccgcactatttgagttctgtgaaagctaatatggagcatgcgggttatactgtttgtgattatgtattccctgctggtgaaagctccaaaaatgcccaccaactcatcgatttagtggactatatggcagctcaatcgttaacacgcaaggaccttctcatcgcgcttggcggtggtgttgtaggtgatatggcaggctttgcagcggctacctatttgcgtggcattgactatgtacaggtacctacctccctattagcggcggtagactcctctgtaggcggtaaaacagctgtcaatcttgaagcaggtaaaaacctgtggggtgctttcaaacaacccattcttgtcctctgtgattcggaaacgcttaatacattgccagacatggaatggaaaaatggatgtggcgaaatcatcaaatatggtttcctcgatgtaccaggtttattaactcagctagaaaataagcccttgataacacaccgcgatagcgttagtgctgtcattgcgcgatgcgtacaagcaaaggcggatatcgtagaacaagacgaacgcgaatctggcgtccgcgccctcttaaacctaggccatacctttggtcacggcattgaaaaagcgagtcactttgaggttcatcatggctatgcggttgctattggcatggtactcatggcacagggtgcggtaaaacatggagaactagatattgaagctctagataagttaaaatccctcatcgaagcccatcatttaccaactacaacgactgtaacaaaggaagaaatcctagcagctgctaagcacgataagaaaagcgaaggcgctactattaaaattgtagtaccaacaagctatggccacagcgaacttaaggttgttacccacgaagaacttgccacctatttagactaagacgtaaaaggagatttctatgcattccgtaacgaacgccattcctacaggaacgattgcgtccatcccagcaaaggcacatgcacaccgcgcattaatttgtgcagcccttgctaactctccatctactatactactaagccgtacctctaaagatatcgatgctactatggaatccttgcgaggcttaggtgctcacgtagtatatgaaaataaagttgtcactattacaccaggtcctgtcccaacaaagggcaatgtagtacctcacgaatcaggcactacattacgtctcttattacctgtagctgcatccatctgtaacgatgtagacgtagatgccaaaggtcgtttaccagatcgccctctcgaacctatgctcagtgaaatgaaagcgcatggcgtaacattctcccaagataaaccgccatttactatgacaggtcgtctccaaggcggtaatttctccatggtaggtgatgtaagcagccaattcttctctggattattgttggcagcccctcaaatcggcctatctactatcacggctactacgccactacaatctagtgattatgtaacattaacgacggaaaccatgcgtgattttggtgtcgaagttaaacataccttaccaagcacaaacatcaacgaggctttcacagtcccatttggtgcgtcctttatcggccgtgataattaccaaatcgaaggtgactggtctaatgcagcaatctggatggtagcagctggtatgacgggcaaaccaattacgattacaggcatgaacaaaaactctgtacaagctgaccgccgcatcatacaagttatgattgatgctggttgtgatgttgtatgggatggtatgaatataacggtcacaggtcgtgcttccaagccaatccatgtagaccttgagcaaatgccggatatgttgcctgttatggcagctcttgcttgctctatttctggagaaagctcctttattaagggtgctcgcctacgcttaaaagaatccgatcgtctcatagctgttgctaatctcgtaagagacttaggcggtacagtgcgtgaagaaggcgatgacctatacatcatcggtagtggtatacttaaaggtggacatggtgattgcgtaaatgaccatcgcctcgttatggccggcacattgatggccctcatcagtgaaaaccctgttacgttaaaagatagcgaagctatcacaaaatcctatccagacttctttgaggactggaacttattaggaggtgatgctcatggcatctaatttcggtaaaactatacaagtatctacctttggcgcctctcatggatacgctatcggcggtattgttgaaggtcttccttgtggacataccatcgatatcgatgagttaaaaacctttttaaagcgccgtgcaccagggcaaaatcaattaacaacacagcgtaaggaagccgatacacctgaatttttagcaggtttggtggacggcatgctcagtggttctccattggcatttatgattcgtaacacatctcaacactctagcgattataacaacttacgcgatatccctcgcccatctcatgcggactttacagctcgtatacgctacggtgataaggtagatatgcgcggtggcggccatttttcagcgcgccttacagctccgctttgtgtagctggtggcatcgctctacaactattacgtgaaaaaggcattgaaatccacggccatttaaaacaagtgggaacgattcaagatgctcctatcaacatggtccacccagatatgaaagcattagctagcatcgctacagaagcaattgctatggttaatccacaaaaacgtaacgaagtagaaacccttgttatggacctcaaaaaaaatggggactctacaggtggtatcgttgaagtcattgctacaggtctaccaattggccttggcaacccaaactttgacggtatcgaaaaccgcttagctcgcgtaatctttggggtacccgccattaaaggcgtatcctttggcggtggcttcgatatgtgtgcacaacttggttccgaagtgaatgatgctttcaccatggacggcgacaagattacaaccacaactaataatagcggtggtattcaaggtggtataactaacggcttgcccctcgttatgcaagtgggcatcaaaccaacaccatccatttataaagaacaacattctgtgtcactttcacaaaaagaggacacattgctcacaatccaaggtcgtcacgacccatgtgtagcgcttcgtgcagtacctgtaatcgaagctgttacggcccttgttattcttgatttcttaggagatattgaccatgaacttagatgaagtacgcgttaaaattaacgatataaacgaccaaatgctcgccctcttcaaagagcgcatggaactctccaaggatgtcgcggcagccaaaaaagaaatgaacaaggctatttacgatgccaaacgggaacgagatatcctcgataaagtaactcgagatgcaggcccagacctcgacctatacgcacgccgtttctttgaagccttattcagcttgagccggacctatcagtctgaacaattgttccaagataatgagttcactgttaaaatgaaaaaggctattgagcagtcccctaccttgcctccacaacgtggtagcgtagcttgtgctggcgtcttcggtagtaatgcgcaagtggcgtgcgataaattattaccactcagccaaattcactatgtaacaggattccgtgctgtatttgatgcggtagaatccggtgaatgtcaatttggcgtattacctatcgaaaatagctccaatggctctgtaaaagaagtatacgacctattagaagagcgtaaatgctatatcgtgcgcggtacgcgcctttggatttctcacgatttactcgtgaaaaaaggcacaaaactagaagatattcacactatcatctcccaccctcaagcgttgggccaatgcagtcacttcctagatacactagaaggcgtagagttacgttccttcgataacacggctcgtgcagcacaaatggtggcagccagtgatgatccaggcgtagctgctattgcagcaccgcaatgtgcagacttatataatttatctccattgatgcgcaatatccaaaatagcgataacaactatacgcgctttatctgtatcagcaaggacttccatgtatacccaggggctaataaaatctccgtggtaactacagcaagccatgctccaggtggtcttggtacattacttaccaagtttgcaaacatcggcgtaaatcttacaaaacttgagtctcgcccgattgtaggtcataactttgagttcttattctacctcgacttagaagcatccctagcagatcctaaggtattgtctgttctagcagagctacacacatcacaagataaattccgcttactaggcaattaccctgaaaactaatatacttatatgtactagtccctataagaacatatatagtacaatacatatagttataaaacttcaatggctaataggtaccagcctattagccattctatgtatattgacctaggaggtcctatgaaatttggtttacttggccgtacgttaggccatagcttctcccctcgcattcacagtgcactagggaatataaattacgaattatttgagcgcgaaccgagccaactacaagagttcttcgctgatccagaattacaaggtatcaatatcactattccttacaaggtaaatgcccttgaagcttgtgatgttgtagatccacgggcagaacgcattggctgtgtaaatacgatggttcgcaaggatggcaaatggcacggttataatacagactatgatggtttcgtatttaccctacaacatgcaggcatcgatgtagctggcaaggaatgtatcattcttggcgatggcgcatcctccgctaccgttcacgtagctcttgaagacttaggagctaagaacatagttcatctctctcgtaagacggcaccattctatggtgatactcctaattactatgaaacagcacagattattattaactgcacacctatcgggatgtatcctcataatccagctaatctcatcgatattacacaattttccaaattggaaggcgttgtagacctcatctataatccacgccgtacaattttgctgttacaagcagaaatgatggaaattcctcattgtgatggcttgccattccttgtggctcaaggtgttgaggcggctaatcatttccacggtgaaagctttggtacaaaggaaattgaacaaatcttgcgcgatatgcgccgtgaaaaggaaaacattatcctcatcggcatgcctggtgtaggaaaaactacagtcggtaaagcgctcggtgaagaaatgggccgtacctgcattgacgtggatcatgagttagaaaaagaaattggagacatttccacatacattacagaacaaggggaaccagcattccgtgaaaaagaagcggaaatgattgcgaaactgggcactcaaacaggtcttgttatctccactggtggcggctgtgtaacagtgcctaaaaactacgcacacttacgccaaaatggtcgtatctaccaattaacccaacctatagaaaatttatctacatccggtcgggttctctctagtggtggtatcgaacgcttacgcgaactcgaagaaattcgtacaccaatgtatgaaagctttgcacaatccatcgtggaacaccatcgcaatgcaccagaaacagtagcggctattctagaagacttcgaaactaatttactctaaaaaattattcatctgtatttctagataaaactaaaactcatatcttaacttcatagatatagtactaaaagcagtagttatccctaagataactactgcttttttatattcgctatgttttatatgtatttgtaaaaattcacgcttgcaattacaatgtaattacaaatagagttgagtaacttaaatacttttaatataaaatcaacaacatgaccaaagtgttatagtcataatccaaaagaatattaggagagatactatgaaaaccgtaaacctacaagtccgcatcaacgaaaatctaaaacaagaagtatctagcatattaaaggcacagggcctatcctatacatccatgcttgacgcactattccgtcaaattataaaagaacgccgtatcccatttgctattgctttaccaacgataacttcagatgatacacctacaccaagcacactcaataagaatggcacatataaacaaccaaaagcctcattaaaggcctcagatgctataaatacatacggaactacaacaactaaagatgatgaaataatctcttttgataaaatcgataaaacgggtattcttaatatccgtataaaccctaaagttaaaacactaacaacagctatcttgaaagagatggggttaaccatatcattgttgattacacttatctctaaacaaatacagttctcaaaagcaattcctaagtcagtaaacaagcctatcgcttgtgactctatgaatgcagactttcttactgacgaagaaatcgatcaactactggaattggcatataaagatatagaacaaggtaacttaatttcagctgaagatctttttgagcaactaaagaaagaaggtcttcttttatgagctataaagttttatttagtaagcttgctgaaaaagaaatgaaaaatattattataaatttaaaagaatttactcaagatttgaatctaattcaacaacgacaagccgaaattcgaaatgcagtcttttcacttgatattttccctgaacgatatcctatatataagactaataatgaaatatattattttcgaaaaatggtcactaaacattatattatcttatacactataaaaaataaaactgtaataattaagaaagtactaacgcaaggtatgagtatataaaaaagtcggccattgccgacttttttaatgtacttttacgcgtttatgttgttgttcgtcgaatacaccatctacgtcgatggcatcgaggattcgttttaattcatgcacatcaatttgacctggtgccgatgctttgcctgcagaggcaaaggtcatagcattgccaaataaagctcctgaagcacgtgtaatagcccccaatggccccatggccatcgtaatgattgggtcagatggatataaggatttcacctcagacgtcgcttcaagaagtgttaatacatcacctgttgtatgaggcataacggctatctttggcacatccgctaaaaatcctttcatttgaatgagtcgatttacaataacatctctacttggtgtaccattaaaatcatgattgctcatgacgattgttacaccatgaaccttggcgaattctatggttttgaccattctatcttgatcaaagaataactcaatatcaatagcatctaccaagcccgttgggataaggcgttctaacattgtaaagtaatcttgtgaggagatagatttctcgcccccctcacccttcgtgcgccacgtaaacagcagcccacgaccttttaattgaggtttcatgagcatcaatagttcaataatagcatcaatggaatgagctcgttcgtaatagtcaatgcgtagctccaccacatcacaaggtgtactgcatgccaccgcagtagcatctagaatttcttttaccgttgtgcccacaataggcacgcatatctttgtacccttttctccaagtacagtttgaccgatacggaccataacaactcctttgcatctcatacgaaacaaatgattcccttaatactatctatgactcatcatagtgctattcatgttttttagataattttctagactgaaagcccatatataacaataacaatccagtaatactgaatacataggatatgcccacataggtcgatacaatactagcaaatacaggccctaccatagaaccaaattgttgagctgtcgtcgtcataccaaacatacgacctctaaagcttggatctgtattaagggttactgctgcactcaaggatgggttaatgcctacaatgcatgaaccaattagaacctgtaaaacaccaaaccaccatatacccactggtaagctttgcagcaatagaacgataccactacccatcatacagtaggaaatggtcttaaaataaccacgacgttcaccaaggcgaacccatagattagtcgttaaggagcctgctaaaccgccaatacttaggatagtacctgaaataatggcggccccttccatggtgccttgcatatcccctacataaagggccaagataggctgtagcatcatgatgacacattgcataaagaagaaaatcccaagcaaccgtactagtacaggttgttgttgaacggccttaaagtcttcacgtaaagatgtagatttagtaggttgagtagcttgcgctgttccatcagtgcctacagcatgtaattttggttcgttcacaaagaacaatacagccaatgtcgcaatcagtacagcaacaccagatacatagaatacaggacgcatccctactacactttcaacagcaccacctaaaaatggaccgatgacattccccaagataagccccgtctggaagatacctagagctcgaccaacctgtttctcatcgacactgagggataccatagtcattgccgcgggatagaacccattggcaaatccaacgagggcccgccccatgagtaattgatattggtctgtaactaaaccaattaatacataacagacagcaatgccaaagccagcgcgcaaggccatccgttttttccctttattatcggcgatttttccccaaattggagccataatgcccgcaatgaggaatgtaatcccaaagacaaggcccgaccaaagggctacatcggcttttgggacacctaattccaagagatatataggcaaaaaaggaataatcatggtgtagcatatagctaatacagtcatggcagccgtaataatccatacattgcgcatgccaccacgagtatcatctgcgattgtactcatctttcgccttctttccacatataaaagtgtataaaaatatgcttttacaaaattatataaagaagagtcgcatataaaacgcgactctctcaattattccactggaaacttgtgatccattacatcttgcaaggaaacgcgctccattacatggcgaaactcatcttgtaaatactgccatagaggagcagtcaaacaatcattaaacataggacatggctctacatcatcctctaaacaggacacaagagcaatagagtcctctgcagcatataaaatttcatatacattatattcagcaggatctttaaccaagcgatagccaccgtatttaccacggccacttttaacgaggcccgcagaggacaagcgagatacaattccttctaagtatttatctgaaaacccttggcgttctgcgatttcacggataggcacatttttttccgtcccgtgttctgcaatatccgctaggattcgcaaggcataccgcccttttgtagatattttcataagttaacctctaagtcattcacaatatatgtatagtataacataaattcatacaaaaaatggtgggaaatatgatacactataggtatatcgaaatatttttatttgatatgatttataatttcatacagggaggatttatctaatgttagataaactatttaaactcaatgaacgaggtacctccgttaaaaccgagattttagcgggtattaccacgtttatcacgatggcgtacatcctatttttggcgccaaacatcttgagtcttgctggcatggacaaggatgccgtcctcatcgctacagctttaggtggtggcctcgtaacgattgctatgggtttatttgttaactatccaatcgcactggctccaggggttggcctcttagccttttattcctttaccgtagttctcggtatgggtgtatcatggcaaacggcactaggtgcggtgttcatttccggtctcgtattcctcgtcttaacgctgacatcgatacgacaaatgattgttgtaggtataccggcttctatgaaagtcgctattaccgttggtattgggctatttatctccatcatcggtttaaaactatccggtttgatggcgatttccatcagtttatctcctaacaccttaggccaagttatacaaacacatggcaatctagtacctccagcatctgaagcattgttaacactaggtaacttgcacagtggcgaaacattgttagccctattcagcctcatctttactgctctattgatggctcgtaagattcaaggttcactcttgattggtgtgttggtaacaacaattgtgtcctatgtaacgggactatctacaatgcctgagaacttcacagtattggcagtgcctgacttctcaaaagccgcatttcttcaattagatattcctagtgcgatccacatgggcttgattacgattatcttctccttcacattcgtagaattgttcgactctatgggtacgttaatcggtactgctacagaggcgaaaattgcggatcctaaatctggtaaattcccaggtcttggtaaagcgatgactgttgatgctatcggcgttagtgctggcgcattactcggtatatctacgattactgcgtttgttgaaagtgcagcaggtgtaggtgctggtggccgtacaggcttaacagctgtcacaacaggcgtattattcctaatctgcttattcttggctccattggtatccttggtaccaaatgcagccacatctcctgttcttatcatcgttggtgccctcatgttaggtgctatccgcaatatcgacttcgatgattggacagaaggatttcctgcattcctcgttatcgttttgatgccgttcacgtacagcatcgctaacggtatctctgcaggtcttattgcataccctctactcaaaatcattgcaggtcgtgcaaaagaagttaactggattatgtacgtattagcggtactcgttatcatccgttacgtattcttctaattaatagctaaaagaacctatctccaaagatattagtacttgaaccgaccccttaatgttagaccaaaaatcttaacgttaaggaggtcggttcactttaatatctaatggataggttctttttttagtgctatttagtattaacgaattgtttttacaccaattaagtctgtacgacttggatcgatatcttttaacggcactacatgatctctataaaagtctgcttcagaggctttcacaggcacttggaagaacaagaaatatgccatattatccttgtaccacgtaacactgcgtactaagcccttatctacatcccctgtatagtgaacctcccctattggagtagagtcgctccactgtacgtcatggtactccattggaatatattcttcaggccatacggtgtccatagagtagctcatgcggaagaccatagtatgatttacccaacgaccgctgcgctcttgatactcttcaccttgcttccaatatacagtttctaatacatcattgtcataaaaatgtgtagcatagtatgtatagccaaacggtaaataacttggtacagatacgtcataggacatcttatgagatgcattaattacaccgctaggtaaaccgatggttttgctggtaagtataggccacacagaattcgtatgtgtacgcaatggcaagccaatcgtttcataaggaggccaatccggatcatcattttgtttaaccttttttgcatcgttttcttcaacattttgcttatcatttcggtcaccacgtagtcgagtatcatcaatggctacgttactcacaggacctacagagtctacaattttgcttacaaagttttgatttcttaaagaagcaaagtagagcatataaactttattatctttttcccaataagcaatttgaatagcgtctttactataacctaacgtatgtacagaaattccattaggggtagtaaagctaactgcatccttagcgttgtaatttgtcttttctaatataggtgttaccactgtatcgatagcccaacccatacgatatacaatatctgtattagagaagattaatttcggaccaaattctccatcacggcctgtttctgtataaacgatttctaatacgtcatggtccttggcctttacatcgcgtactgcatagtctttaggcatataagacggaacttgtataggatagccaaattcctgcgcggcactctcaatattagttttaactaaatcataatcatcaacttgatcataccaacgataacgatcagcgagttttttattatcatcgatgagctttttattatctacatctcgttcaacaggaacggtattaccatttttatctattaacgggtatgtagcactaactggctgtacgccaaaggtacttactgcagtagccatcgcggcacataaaacagcagatgtcattattttcttcatattctctcctattacaaaaatttataatatactccacacatataatgatatattttcttatttatatcaaaatcaagctaccgtttctgtagctctagctacttcataaaacttttatctttccttttgtgaaagtatcgacacaaccaaataatgtatctaatgcttaggttcgatataaaaaaatcctactgaacgctatatcataatagagttcaataggattgttgtgtcattatttagttaatggcggcataatagcatcttgttcaagttgtcttcgtcttttggccgtatagtcgacaattttaatttgaactacgcccacagagtttaccatggcttccgtaaaagtaaactcacgacctgtctgatgtttcatcaatacttgtaagccatgagacttttcatcaatagcctctaaataggtagcctctccacggcccatcacactggaataaactgaactatatgcacaaggaatatcaccacctgaaacaagggcttcatcactgccatcaatttcgataaatacatgaggatttgctttaatcaagtcaaacttctttccctcataatggccatgcacatagatataaagcacctcatctataaattcaaaaccaaaatgtaagggcaccacgtaagggtagtcaccatccatcatgcctaggtgaatgatgcgagtgctatttaaaatgcccttaatttcttctatatctgtaactcttctgtcttgtcgtctcataataacctccacgactttacgtaaaagataatctatcaattattatagcaaattatgaaaaccttttaacgcatagtatgcttttaaaagtatgaatacgctttcttttattcgtatgttaataatactattcacaggatgtgtctactgtaaaaatacatttgactttttataatagatactgtattataagaaaatagttttatatattctatagattatgaaagttatggtcatccatggctttttgtatttataggtagtttgtagaaaagaggtctttactatgtctgatacgaatcagttagagcggggccttaagaatcgccacgtacaattgctcgccatcggcggtgccattggtacaggcttattcttaggttccggtcgggccatccatttggcaggtccatccattctttttgcttatctcattactggtcttatatgtttctttgtaatgagagcgttaggggaattattattatctaatcttaatcatcattcctttatcgattttgtagaggattatctaggtgatcgcgctgcgttcatcacagggtggacatattggttctgttggctatcactagccatggccgatttaacggccgtcggactgtatatgcaatactggataccatggctaccgcaatgggtcccagccctcgtcgtcttaatagctctattactcatgaacttaacagccgtaaagcactttggtgaaatggaattctggtttgccatgatcaaggttattgccattgtgtcccttatcatcatcggcttaatcatgattttctctggatttagtaccgatgctggtgtagctgccgcctttagtaatttatggaattacggcggatggttcccaaatggaacgatgggctttatcttatccttccaaatggttgtatttgcattcaccggcattgaacttgtaggtttgacagcaggtgaaactgaaaaccctgaaaaggttattccaatggccatcaataatattcctttgcgtattattttgttctatattggttccttggccatcatcatgagtatttacccatggacagccgttaaccctgcagccagcccatttgtggccgtatttacagcagttggtattaccgcagcagcaggtatcgtcaactttgttgtgcttacctctgccgcatcagctacaaactctggtatttttagtacaggtcgtatgatctatgcccttgcaaaacgcggtcacgcacctaaatcaatgcgtcgcttaacacatagtagcgtgccatatcaagcgactattttctctgctgccgtactacttattacagttgtacttaactatgtcatgccagaagcagtcttcgttatgattacatctatctctacattctgcttcattttcatctgggctatcatggttatttgccatttaaaatatcgcaaaaaaaattctgaattggcggcaaaatctaaatttaaaatgcctctatatccagtgatgaactatttaattcttgcgttcttcgcgttcatcctcattatcttggccttgaatgatgacacaagagttgccttattcttcacaccagtttggttcattatcttgtgggccttctactccatgctcaatacaggcgacgaagatacacttgaagaagaactattagacctagcaggtgctaaaaagcaagctaaaaaacaaacaacagatgatcacgatgattatgtaatttaacacaaagcccctacctcaccgaggtaggggctttcactatatccaaactatttcaaatttgggaaattaatttgttcataattttgttgatagattgaactatctcctatattttcatcgtaattcatgatggttcgaatccgacgaccttgactggtaacgataatatctatagaagaaggaatttcctgattcgtttgttgtagatacatatacaaatcctgcaacgcctgagcctgacgtaatgctcctgttctatatttttccttagataaaccagtatttttaatagtttgaccactatatacttggcccatcgtatccgtatagtagaaacgaactgtattgtcagatggtacagccttaatatagatggttttccaattcttcttaatcattgatctagtggatacggccacattattcactaataattgtgtttgtttattgatttcttttgtagtaccattacctaccgagatttcatcattcttcggcatgtgcaacatagtcatggttggatctggtttaactgatttagcatctacaggttgcacgccacagatactaactgcagtcataactgctaatgtggataataccaatttattcatagttctctccatactatatataatatatgactaactatattttatacaattcattataggcataaataatgtatttatcaagtgacgatccagccccataaaaataaccgatatgttccccatacaaggatacatatcggttattctttatataaaactaattactaaaatccgtatccacaatagcaaattgtgtataatctggataacggttatgaagttctgccttaatcttttctaatgtaccatgtggatcttcttcgtcaaagttaaagataatatcataatagataatctttttatcttctcgtacatagaaagcatggagttggactacattagtatacaaactgataacttgatcaagcgcttttttaatttcaagaacttctacgcttggttgattttctgcgtatacgccgacagtcatattaatgccaaactttttataaagatgaactgcgattcctttagttaaaggatggacctcacccactgtcatcgtatctggcaacgaaatatgaacagaaccaatcacttcacctggtccatagctatttagcactaggtcatatacaccgccaacatgtggatgttgcgcgatagtttctttgatgtttcgaataagatcatcatcggcgcgaacaccaagcaaatgattatacatatcccgcaagatctcataggctgctttcaaaattaatagcgaaattaaagcccctacatagccttgaatatctacattgaagaaatatacgaggcctgcagacaccaatgtagcaaaggtaatcaccgcatcaaaaagagcatcaataccagacgctacgagggcatcagatttatatttctcaccttgagacttaatgtatcgccccatcacaacctttacaacgatagcaacagcgatgatagcaaggcttggaatatcaaatgtggatacctctggatgaagaattttatctatcgactccttaagggacccaatgcctgcaccgagaatgatgaaagcaatggccatcgtagtcatatattctatacggccatgtccaaatggatgttccttatcggctccttttgcggccagttttgtaccggcaattgtcaacaccgaagaaagaacgtctgttaagttatttaccgcatcaaggattatggcgatggaattcgatgccaatcctattatcattttaaaaatgacaagcaccacattacctataatgcccttgatactggcgagcgtaataccccgattacgttcagcactattttcttgtaaaatcattctattacacctcttacatactatatgtacaatattaaataatttatatgtgtacgtttatttgtattatagcttatggattatcatttgtcactataattttctgtatatttccatgaaatccattgattttactgaacttatcagtcattctcatttctcaattagaaacttttatatagttaagaactcattctactactgaatgaccattctaattaagcttgaacagttatacggtctccagaacgcatatgtgtaaaaacaacctttattgcacgtagtgcaaatggttctcccgtagatttcgccccatacaatgtatcccctaacaaaggatgacctatatgactgaaggccactcgaatttgatgtgttttacctgtatataagcgaactgccactgctgtacaaggctgatttcctaagttatgcacagaattatccacattttcaccctgtttatccacagtattcactgtgctgtccacattttcatgggatatatccacaatattttgtaggttatgcacagagttatccacaaccccattcggatatcggtgtaaaacggtaaaatcagtccgtgtttctttccccttagaatttacttcgtaatgaatactatcaatacttctatccataggaagcaccaacgaatccgaatctaattcgacaaggccttcaacaatagccatgtaccacttttcaaatgtgttatcatccatctgttgttgatataaactttgggctaaaccgcttttggcaatcactatacaccctgtagtatcacgatcaaggcgatttaagaagcgaatctttcttttaatacctcgatccttaaaataataagctatgccattagcaagggatacttgatcttttgagtttaccgtaacaccggcaggcttatccacaatgagcaaatcgtcatcttcatagagaatatgtaaatccattgcaattggctcatgatcaatcttctctttggccatagctatccaaatttcatcatctacggcaacctctgtatgaggtgttgctttgtgaccatttacatggattaatttctcatcaaataactttatcatcgcttttcttggatatttagtatctaacagttgccctaatgttatagcatctgtagttgcatgttgtatggattctatatcctgggtagtaactggccaaataatatcatctggtctatgcgtttttcgtgccattacatactcctttctacgagttttacatcccttggcatataatcaaggaatgcacttggcgctgtgccttggccccgttgtgattcattggtataggtaataaccagctcctgttttggtcgcgtaatggccacatagaacaagcgtttttcttcatcctcattgccctcgcgtaaggacataaaactaggaaaggtcccttgattcatacctgccaaaaatacatggtcaaactcactaccctttgcttgatgaaccgtaataatcggtatcttagattgtttactcatctgttgtggctcaccagccgtcaaggcagctaattgcaaaatatgattgagacgagctaatcccgttgtaccttcatattccttatctaatgattccataatacgatacaaatctcgtatatgttcaaccttggccatttcgccatgactcttataatagtctagtacgcccatttgattcataatataggccaataattccgtaggattatcggtatgcatctttctgcgcaaggttgccatttgagacgcaatcgttgtgaaagccgccttatattgattaatggctaccatgcgatctgtcgttgtgggcacaatattttcacggactgcgtagattaataattggcccgtagcgataatatcatccatcgcattatgggtaggcgtatgattgataggaaaatattttgataaaaatcctaacttatgattttccagtgttggatagaaccgtctaaagatatctagtgtatcatatacggccttaaattgaggctctcctaaattatggcgcgctaattcatggctcaaaatgctaatgtcataatttacattatgacctacaatgatacgattgttagaaaattctttgaaagcctccaatacgacctttggactttcaccatgctctgctaaatattcatctgaaaagccatgaacaagttgggatgtgcccaccgatttaccaggattgataaaacgttcaaaccgttctatttcattgccatctttatcaatgcgcatcgccgcaatttgtataattctatcttgtgtcgtatccgtaccagtgctttctacatcgtataccaccacttcacccacctcaagacctgctaccaatttggcatatggctcagcttcaaaaatgggcatatccataaaatctgtcaattttagccctacactacgattttttggactttcaatatcgcgaatacgcgcgtcgccaatgcccgatacatagcgtttaataatgcgtttcgcactgaccgcatcattaggattcatcaagagcttaaaatacgccatgatatccttgatttcctgacgtcggaagaacttatattcatcaataatcataaacggacgacgttcagattctggtttctcttgattatatcgttcaaattgttcacttaaacgctgtgccttgcgattatcacgaaccaacacaccgatagatgcgtcctttggaagcgcgcaaatacggtcataaataaattttgattccgtatattcattgcgacaacctttcacaaggataggtgccccatcactagcactgttggcctctggcatttcatcatatacatcgcctaccaattgaggaaacatcgtttgcaatgttttgaaagccatcgtgaacaaagtacggttggagcgatagtttttatagaatatgatttttagaggattaaaatcacgggtaaatgcctctaataaacggaacggatctgagccgcgccattcgtagatagtttgaaaatagtcgccacataaaagaacgtgattgccttcccaaagcatttccataaccttatattctaatgagcccgtatcttgcatttcatcaacggaaatatattgatagcgactacgccagcgttctcgaatatctggattttgaaatagtcgatgcacaccacagattaaatcagtaaaatcaacgccgtgaacggattgtaaactttcatcataacgagcaatccattcatgaccatgcgcccaaaagtccgacaagtcctcagtagcaagcgtattgtaattgtaaaataatttctctatttgcttagattgctcctgctctaaacgttgtatcgttcgtttgtaatcatctatcaacgattcagaatagaattcatacacagaacgatattcctttaccatgcttataaggctagcaaagttcatatcccgcatatttctcggtttatatggcaaatatagttctttacaatcctcttcatcaaatatagtcacatctgtatagagcgactcatctcgcttgccctcttgttgaagaacgtaaaaacaaaagctgtggaacgtactaatatccacagcctttgcaggttggccaacgagggattcgatgcgcgacttcatctcttgtgccgccttgttcgtaaaggtcatacacaaaatctgatgcgcctcgcagcggccattttcaataatatgggccactcgataagccagtgtattcgtttttcccgtcccagcggatgccaacaagaggatgtttctatctagttcatcgatgacgcgttgttgttcgctattgataaccatgatatcctctccttattttataagccgtagtatagagcggccagtaccatcggaatggggccaaatagtacggtcaaagcccacacaccaaagccaatatccattggtatatgtaacacatagatacataccatgtatgtcacaatgcctagtgcaacattgatggctacctttttaatggtgaaaaaagccaatttcaatgcaataactatgacaaatacagatataaccgcctcagtcataggcgctgccaataatggcgcgagtaatacgttcatattatcctttcatctcctggcggtttacaacggcaccgcccaaggtcaattcatcggcatattcgatatctccacctacaggaacaccgcgggcaatacgcgttaccttgatgccagtcggcgctagtagacgtgccaaatataaggccgtcgcctccccttctacatcagggtccgttgcgagaataacctcttgtacgacaccatcacgcaaacgagcaatcagctctttaacgcgaatgtcttcagcaccgatgccctctaaaggtgacaacgccccctctaagacatggtagagccccttgtaatcaccactgcgttctatggcaatcacatcgcgagatgtttcaaccaccataatcgtggtttgatcccgattaggattagagcaaaattcacaagggtcctgcgcagatagattaaaacagatagaacaatggcgggttgcccctttagcttcaacaatggtattgaccaatcggtccacctcttcttgcggcatttccacaagatggtatgccaagcgacgggcagattttgatccaatgcctggcaatctgcgcaactgttctacgagccgttctaatgcgtttgtcatttagaataaacctgttggtaagttaagaccacctgttaccttgcccatttcttgagacaacagatcatctacctttttgcttgcttcattaacagcagccattaccaaatcttcaagcatttccacatcttcaggatcaactgcagaagggttcaatttcaaagattcaatcatcttttcgccattcataacaacggtaacagcaccgccacctacggatgcttctactgtacgagtttttaactcttcttgcatttttttcatgtcagcttgcattttttgaacttttttcatcatgcctgccatattgcccatacctttaccgaacattgtatttcctccttataggactatgaaagtccttgcaaaataaattaactatataccgaaaattataatttactcttctatgacctctacataaatgtcatggtcttctgaaagtttctctaatgttttagccaacagtgggttttgttgttcttcaacgcccatatgttcaggatcccactggtattcacgctttgggacggcttctacctccacggtgacaccgctatccataggccgattgataacttcaccatcatcggtcattacctgtgttccgtctaaactcataacgggtataccaccatcatcatgagccgtcggtttcttagtagcagactccgcatcgcccttactgcttggtggttttatacctcttgctttaagagcagctaacgcggcctctctagcattattacgagcttcggagctgacaggctctggcggttttacgccaccagatacatcttgagtttcagattgtatagtagctccagacttctcttcagtatcctgagtcgctataggcatagaggatattgtttcaccattatcaagtaagtctgtttctaccggtggtggcggggcctcaacaaccggtgctggctgtgcacttttaggttgtacagctcgattagaccgcgctccactagccatcatatattctttatagacatctgtctctatatcgacaatctctaaagacacggaatagcccagcgcatattggaacgctaatgcaatttccttgcgatttgcttcattagtagccaaggtaagggatattccctttttaaaagctactactgctttttcacgatctacataaataacttggccttgaccaataatattatatgctaatcccttatcgctgtcctttagatattttatcacagtagtctgaatggttctatattccccagagtccaccatagtttcaccgataacagcgacttggctaatacctgtattcttctgacggcccgtatgtctcgtcgttcgaggcgtaccagtcttaggttgtactgcaccagaattcttcatcggtggtggtgtcataccaacaccatgcataggtggtggcacagtccccgtaattggtggcggagtcaaacctgtagcagccatttgattactaccactaggtttcgattccgctacagtaggtgcaggcttataatttgttggcacttcatgaatcgtaacagattcgtattcctccataggcggtggaataaaatcatcatctaccacattagaccttgatgcattaggtgtagccacaaaattaatagatggtgccgctatcggtgggccttgttgctccaacttagctaatcgattaagaagcccttcccgagattctcgctctgaatgttccaaggcggataagcgttcttctacatcatcatttgcttttgaaataccagcacataatacgagtaatcccatttcaataacagtccgtgggttatctacctgtttcgcatcgctcatgatggattgtaactgtttaatatattgattgatggtaccaaactcgatagcctgtgcttgttctaagaattcagtgcggaacgagtcatatacctttaattcctcagcatcggaagcgaccttcgcaatcaataaagcccgtaagtgttgcgtaagggcctccatgatttgagccccatcacgtccttcactaagcgcattttgaatatattttaatacggctggcccgtctccatcgtgtaaggcagctaggaatttgataatccagtccttactaacgagaccaatgagttcctctacaacagaaggtgtaatctcgccgctagccattcccacacattgatcaagaatacttaacgcatcgcgcaagccaccatctgcatgaaccgcgataagacgtgcggcattatcctctaaggcaaagccttctttatctgcaacatattgtaaccgctgtgcaatatcatcagatgtgatacgtctaaatgtgtaccgttggcaacgagatacgatggtaacaggcaatttttcaatctcagtggtcgcaaagatgaacatcacatggtctggtggttcctctatcgtttttaatagggcattccacgcttcattggtaagcatatgggcttcgtcgatgatgaatacctttttacgcccctctacaggcataaactttacgctttcacgtaaagcacgaatctcatcgataccacgattcgacgccgcatcaatttcaaggacgtccatagactgaccactcaaaatcgatttacatacgctacattcattacagggatggtctgtaggaccatgttcacagttaatggcacgagcaaaaatcttggccatactcgtcttaccagtcccgcgcgggccggcaaatagatacgcatgagccaccttatcctcgcggatagcgcgcatcaacgtatctgatacctgatgttgtccaaccacatcggtaaacgtctgcggacgatacttacgatatagcgccatatatgccataggaacaccccctttccctgtaaacagtccgtaattaacaatactttattataccatattacacaaaaaagagggcgtcctttcacgtcctcttttagtataactagtaccttattcagctacaacaagtagataaaaaaaagcggcccccaaggccgccttgcaatattcgatcacgacagcccccgggttccccgtggcacatgaaggttaccgcttagtgctgctacctctcagtcctgacacgattcacaggcccccattgcacgggcccgagaactgccatgatccaatattgcaatacagatattatacatgaaaatgcctctatagtcaaaactatagaggcattctacattacattctctctaagttatattagattagaacttattttgcatatttttctttaaatgcagccaattgagcttcttctaaggacaagccttgttctttgaatcgttcaatagcagcatgcatttcttcgtatgctacaggaacaaccttagtaaatctatttgcaaagttattccagttttcaaggatatgacggccttttgtggaattagtatgcaatacatgttgttcgactaattctttgatgcgtttaaggtcatcattattagcagaacgtaattctacaagaccagtatttacataacgctcatcgcaatcgaggatgtacgcatagccgccggacataccggctgcaaagttacgaccaattttaccaagtacgagaacttcgccacctgtcatgtattcacaaccatggtcgcctacaccttccacaacagctgtaataccactgttacgaacggagaaacgttcaccagctacaccattgataaaggatttaccagatgtagcaccatagaaggcaacgttaccgataaggatattttcatcagcttcaaagatagatttcttaggtgggtaaacaacgatggtaccgccggataaacctttaccgaggtagtcgttcgcatccccttcgagttctaatgtcatgccttttggaatgaaagcaccaaaggattgacctgcggaaccttcaaagttcaacttgattgtgttatctggaaggccgctttcaccataacgacgtgttacctcagaaccaaccaatgtacctactacacggttaatattgttgatagccaatttagcgcgaataggtttttgatcttcgatagcaggacggcacatacgcaagagtttagacatatccaatgtgcgttccaattcatggtcttgatcgatggtatgcatatgaccaacagatgcatcgatgtatggatggaacaagatacgtttcaaatcgacacgagacaatttgaaattatcgtcttgagatttttgacggacaaggtcgatacggccaacaagttcagctacggaacggatgcctaagcgagccataatttcacgcaattcacgagcgatgaaaatcatcaagttttctacatactcaggtttaccgttgaaacgagcacgcaatttttcatcttgtgtagctacgccataagggcatgtgttgaggttacatacacgagccattttacagcctacagcaacgagtggcaatgtaccgaaaccgaataactcagcgccaagcatagcggcaacagctacgtcgaaaccagtcatcaatttagagtctacctctaattgaacgcggtcacgcaaacgattaagcatcaatgtttgatgagtttcagataaaccaagttcccaaggcacaccagcgtgttttacagatgtacgaccagccgcacctgtaccgccgtcataaccggaaatcaagatattatctgcttttgctttcgccacaccagctgcgatagtaccaacgccagcttcggaagtcaatttaacggaaatgcgagcatctttattgacgcatttcaaatcgtaaattaattccgccaagtcttcgatggagtaaatatcatgatgtggtggaggagaaacaagttctacacctggtgtggagtgacgagccttgccgatttcaggatatacctttttacctggcaattgaccaccttcacctggtttagcaccttgtgcacatttgatttgcaattcttttgcatgaatcaagtaattagcagttacaccgaaacgaccagatgcaatttgttttacttcagagttcatgctatccccattaggcaatggtttaaagcgtgcagagtcttcgccaccttcaccggagttagatgtagaaccaagacgattcatggcaatagcgattgtttcatgcgcttctttactgatagcaccataactcatagcacccgctttaaagcgttttacgatggattcttcaggttcaacctcttcaataggaataccgccgcctacaggatagttcaattccatcaaggaacgcaatgtaacgtggtaatcattgcgaatggctttagaatattccttatattttgcataatccccgttgataagagattcttgcaacaactcaatggtcttagggttgaataaatgttcttccccgtcttttacagggccgtaccaaccgcctggttcgagaacagattcgtcttttttgaaagctcgatcaaagcgagccaacgcttctgtagtaacaccatacaaaccaatgccaccgatacgtgttggtgtatttacgaaatattttttaatgaaatcagagttaagacctaatgcttcaaagatttgagcaccatgataggaacgcactgtggaaatacccattttggacataaccttcataataccaccgacggcagccttaatatagttttgttccgccttttctaatgtaatatcaccaaggcgtttgcgcgcatgtaagtctttgactgtttcaaatgccaaataagggttgatagcagttacaccataaccgatcaatgtacagaaatgatgtacctcacgaggttcaccagattcaagaatcaagccaatttctgtacgcaatactttgcgaatcaagtgattatgaacagctgccacagctaaaagtgctggaattggcgcatggttcgcatcaacaccacggtcagataaaattaatacgttttgatctgtacgtgctgcttcttctgctttttcacacaattctttaagcgcttcgcgcattccgtctacacccttagatgggtcaaaaaggattggcaatgtcacagatttcatacgacggcaagcaagagctttgatagatgccaattcttggtttgtaaggattggtgtacgcatagacaatgcatatgtaccagtcttattaggatctgttaagttgccggagttgccaagcattacgcgtgtagatgtaaccatttcttcacgaatcgaatcgattggaggatttgttacttgcgcgaacatttgcttaaagtagttatatagtaattgtggtttttcagagaggattgccaaaggcgcatcggcacccatggcacctacaggatctttaccatcctttgccataggcacaatcatgcgtaccaaatcttcttgagtatagccaaatgcttgttgttgcttaaataaatcgtctacagctggcacatcactttcatcagcttgtgtaatttcagacaaatgaataacatgttcttttacccattcatcatatggcaattcagttgcaatgcgttgtttaatttcatcatcggaaatgatacgttgttctgccgtatcgataagaagcattttgcctggttccaaacgaccttttgcgctaatattttctgcattttcgttcacaacgcccacttcggatgccatgataacgcgatcatcagttgttacatagtaacgagcaggacgcaagccattacggtcgagaacaccgccgataacagtcccgtccgtgaagcccatagcagcaggaccatcccatggttccatcataaagctattgaattcgtagaagtcatgtttttcttggctcatgagcttattgcgttcccaaggttcaggaatcatcatcatgattgcatgaggcaaggaacgacctgtcatgtgcaagaattccaatgtgttatcaaacatagcagagtcagaaccgctatcatctactacagggaatacctttttaatatcagggaacaatggagactcagctttaccttcacgagcattgatccagtttacgttaccgcgaattgtattaatttcaccattatgaactaagaaacggttaggatgcgcccgagcccagcttgggaatgtgttcgtactaaaacgggagtgaaccatagccaatgcagatgtgaaatcaaggtcgctcaaatcaaggtagaagtcacgcaattgaccaggagtcaacatacctttatatacaattgttttagaggacaaggatgcaatataaaagtcgctagatagttccttactcaatggaataatgcgtttttccgccaatttacggataacatataatttacgttcaaattccgcattattcgttacatcagggcctttaccaatgagaatttggatcatccaaggacgaatagcagccgcttccttaccaactttagtaccatctacaggtacttcacgccaaccgagaacgacttgtccctcttcgcgtactacttcttcaaaaatccgtttttgctcattacgaagactttcatatttatgcgcaaaaatcatgcccacaccatattcacctgctgcaggtaaattgatgcctaacacttcgcattcacgtttaaaaaattcatgtgggatttgtaccaagataccagcaccatcgcctgtatccttatctgcaccagcaccaccacgatgttcaagacgctctaaaatacgcaagccatcatcgatgatatcatgggattttttgcccttaatatttacgacaaaacccataccacaggcatctttttcaaattggctgctatacatgccatttgcttcgagtctagcctgatctaaacgttgttgatcaataacgctaccattcatctccatagcttttgtactccttctcatatcacttgatgtttcacaacctctataatcattatatataagccttgtgaaagttacttccatttcaatattcatataaaatttagattctatagaatttaatgtctatacacagtataccaaagtccactgtaaattgataatataaaaaccgcaatctaacttgcggtaaaatcatagccatatgcgtattttgtatacatgattcattataggaaaacaaaaaaggggtaaaatttttccaccagccgattccacttagccctcaaggcttcgtatggctagcgtcaaaactttaaccccttccctttacagtactactactggtagttatagattaagcaaacacttcatcaaagcatgcttcatcaatcaacgttcctacatagaaatcgctgaagataccatatcgtgcactcgcttcttcaaagcgcatatcataaacaattttcttgaattggatgtcatcattactaaaaatagtaacgccccattcccaatcatcaagaccaacaccacctgtagtgtactcagatagtacttctaaatatggtctaccagtgattccatgctcacgcatcatacgaccgcgttcctctggaggcaacatataccaattatcattgccttcacgcttcttcgtcatattataaaaacaaatatatttatcctttggtacagttggatacaatttcgcatccacctcaggcgtatcaagcttagctttcacatatgcactaacctcggttacagacgtataagaatacgtttgaacaagcacagacgcaatcgttaaacgacggaatttgcgttcccattttgccaaatcctcaagagacggcgccaaaatccacaacaaaagatcgcccttataaccattcacatcatagaatgcataactgccttctttagcttggtgcatagactccaactcagccaaaaacgcctttaactcaccgcgagcctcagccttctcctctacatcaaaacaattccaagcactaaaatccatggaaaacaccatatgttgactatgccaaccctcaacagtaggaattgccttacccatacaatcactccttttcacataaaatatataaaacacaatttacaattacaaaattgaacccctagcccgaagaccgtttgcctctaacctaggctaaaggaccttgtactagatggaggctaaaatccgctacagtaggcaatggataagccttctgaagcgactttagtaagtcgaggccctaggccgaagaccgttttcctctaacctaggctaaaggaccttgtactagctggagactaaaatctactacagtaggcaatggataagccttctgaagcgactttagtaagtcgaggccctaggccgatgacgattctcctctagtttaggctaaagaaccttgtgctacggttgtttaaagaaatctacagtaggtgaggtatgggcgtcaataggcgactttagtaggtcgaggccctaggccgaagaccgttaagctagctggagcctattgacgcccataccgaatcggctacgtagaattacaaccgttgcacaagttccttagcctgctttaccccatccggtatcccaatcccatcaaacggtgtcccaatgagatacaaattaggataatgttctttcacatgctcccgaacggctgcgatagcagcacgatggcccacattatattgaggcatgcaatgtattaaacgattgattttgatccattctggatttgcattaaagttcataatacgttgaatttctttaagagctaatgcagaaagttcttcatcactataacgttccaccacatcattaccaggtttaccgataaaaacgcgaagaacgattttatcatctggcgttgtttgtggccatttttgatttaatatagtacacgctgttaatggtgtatccgttttacgagtaatcaacaagccagagccttttagttcgccatcaaaggacgctttatcaaaggccatgattgcaatagcacaactggattgttccatattgcgtacgccatcaaatccagtatctccaataaaccaatctttatacgtagctggtggtgtagagataaccaacatatgggaggtttcttctcgaccattcacattataacgatacactgcatcagcatacgatatatctcgaacaagggccttagtagtcaatgtaacattggatggcatttgttccacaatcgcacttaccacgctttcaagaccacccgttaattgtctaaacataccggattgtgatgcggttccttttgatgcttttagatttccattcgttcgctgaatactagattgtttcttatcaaattgagcatccgtcatcgttcctttaccagcacggggaacgtcgccttcattaacagcacctttggcagccttagatacccccgccttttgatggctcatcttagcagcaatcatgcccttaaccatattgccatatttttgttctacttgaataaaatgtggaaacgtagataatagactgattttataaatatcgccaccataaatacccgccaataatggctcaattaatttatccatcatttcttgacctaaatgatagcggaaaaaatgaccaatcgatacatcaccgtgagcatctaagggatacggtttcttaaaataatcaagaccagcacgcactttaccagcccaggaaattaaggtcgctttcacaaaaggcatcatttccgtaggaacgcccatgatggaaccacctggaattgggtgaatgttatcgcggtcatacacataggcctgccccgtttcattggatacaagcgtatctgctagaccaagatctgtaatgagatctgtcatttccgttttgcggcccaagtaggaatccggtcctaactcaaccacaaaatcatctacttgttgcgtttgaattttaccgccaaatcgaggggcctgttcatataattgtatctgccaatctggtttggcatggcctaaataataggctgcagtaagccccgtaaggccaccaccaacaatcgttaccttcacttattaatcctttctcgtatagcctttgccatggcctccataaatagggtatttccattgggcataggcagacgttcatatgtagccccagcattttcaacgatattccgacaaataatatcattatcatacaaaatttctacatgattgctaacaaacccaaaaggaatacatacaatccgttttgctccatctataagagcctgttcaatgacactttcaatggtaggacctaaccattcaccatagggcgccgcactttgccatgcctgataccagtgattaaggcctaccatttttgcaatttgatttgatgcggacatgacttcatcttcatagctaccaaccgttgaagtaggtacactatgggcagagaaaatacaggctgtatcagcttgtaatggattcgcggccatcaactgtgaacgccagtattcaaaaaactgtggtctattccaccaagatttgataatttcacaagatatatccggatacgctcgtaatatagaatgtaatttccgttcatatgcgcccgttccaaccatagaataaaacggcgatgtgacaatacataaaatagaagtataccctgcagttgctatggattctatagcttgttccatactattaggcatatgaagataggccaaatacatcgcgtctatcgccaatagggatttaagagttttcttttgctcttcccccatcgtttgcaacagcttattatcccattgtccgatggcatcgtaacgagcagttagaaccttcaactctcgttctgtgggaatttttccgcgtcgaatgctcgtcaaatagggtaataaatcagatggttgacgaggtgtaccaaaagataataacagtatagcctgcttcatattatcggctttcacgagcccacaattcacggctcttttcatgaacataatctgtcaaccaatgtaatttcgctgggtctgcctcagggaatacgccatgccctaagttaaatacatgtttaccatggcgaacgccatccattaagatttcatctaccaccttggctattgtttttgtatccccgtataaataagccggatcaaggtttccctgtactgtttgtgtaacacctctatccttagccgccccaagagagcttcgccaatctaaggcgataacatcaagaggtaatttagcccaagtagaaacaaggtggtctgtaccgacaccattcatagcgagcggcaagttagggaatctagattttactgtggaaataatacgtttcatatgagggaaaatagcttgctcatattctgtactattaacggcccccacccaagagtcaaagatttgtaaagcattagcaccagcgcgtgcttgcattgacaaatactcgatggacatatccgctagtttttccattagtctattccaaatttcgggttcgctgattaacatcccacgagttttgttataacttttcgtaggacctccttcaataaggtaagacgcgatggtgaatggtgcaccacaaaaaccaataagaggtacatcaagcacctcggtagtcaacaactcaatagttttggaaatatactctacctttgttgcatcaaacgcatataattgttcaatatcttccatacggcgtattggagtatcaaatacaggacctacaccaggtttaatatccacattcacgccaatggccaccatagggctcataatatccttataaagaatagccgcatcaacgccatattctttaacaggcagttctgtcacttgtgcgcaaagttctggttgtttggtaatttcgaacaatgtgtacttctcttttatcttacgatatgcggcctgactgcgccctgcttggcgcatataccataccggtgttatgccagggttcttgccctgaatcatatctaaataagcagtattcaaatttccacccctttctacaaaacacacccatacatgtatataagattttatattagactgtcacgcttatattaaaagtgtaccccaaaagtgatgaatatgcaaagccacttattatctatatttttagggatagaaatttatgcacgttgtaatatatgcgtatctataccagcaatagcttgacccatgtaatacacttgttgctgacatgtaaacaaccaaatttgttgatgttcaccaagttcagctaacaactcaagtgcactcttttggcgatcttcatcaaatcggactaagatatcatctaatatgattggcaatgcatccacttggtacgaaaagacctttgctagtgccaaacgcaacgcgagatacacctgatccgctaagccactagaccaatgataaatcggtaatcgttcaccccgttcattcaaaagggctaaaccgtcttgcaatccccacatatcaaatgtataagcaccattcgttaatcgtttaatatattgagatgctaattctaacatctttggttgtgactcttcttcgtatgattgttgcgctcgttccatacaatgagcgatgacaacttgagtagcccaatcttccaaggcagattccaattcagattctaactcttgtcgttgttgaatggcttcccgttgctcctgatctgaacccaatgcacgcatagcttccacgatttggcctcgtttctcatagaggttagccatcgcatccttgcgcgcattcagctcttgatctgcatgggctaattcatcagtccaattctctttattcccctcacgcaaacggcgatagaacaaatccttattttcaccatctggagttaacaaatcaagctgtacttggctttgtttgtaaatcgtttcccattgcttaaactgatcttcatcaatgagtttttgacgatattcattggcgccggacactccacttttttcaagcaatgctttttgttcaagtaaaagttctttttccttgcgatgccaattatcatactccatacgatagctcttacgctgtgattctttttgttcccaacgaatcatttgttgttgaaagtttttatattggttataaatacgttttagctcagtaggagacacaggggcttcaacaccaaggttataccataaggtaacagcttggtcctctataacgcgcaaagattccttatgttcatctaagcgtttctcgtatccttcaatggtccgcaattgttcataatactggtcaaattcatgcttcatactaaagaaatcatcttcatcgagactcttagccgctccttcaggaatccatgcttgccattcagccaaggctttttcataattagcctgtaattgtttaccttcatcattgtaacgttgctcaatagctgccgtttccaagttcggtacatctgacgccacaggtaaaggtacatccaattgtgtttccaaatacgacttacgttgctgtaagcgttccagttcacgcatcaaccgagctacatcggaatcatctacatggcgaaggcgccatccataccagaacaatcccagtccaagtattaatagaataataccaccgatgctatatagtacagattccagtgcaataagtcctgctagcgacatcaatacaccaacgacggctccaatccccccaatacgttgcaaccaaatcggcatcgcggccatgcgtatggaaccatgttctccaagtcgagactctagatttgcaatatcagtcataacagcctgcaactcttgctgagcccaggtgttaacagggctattttcaccagtgtcaacagatgaactatcttcacttatttttggttctttttgcaaggatggtgcttggctttgccaatataataattggtcctttgcggtacgcaatcgtttggataaacgttccccttcaaaccaattcacatcagttggaaccgattcatccttgcgccatgaagattgtaaccctctcgagaaatcaagttgttctttaaccttagcaatgtaggcttcgccttcttcacactcacggcgcaattgttcccacttcgcaccttgttgaatcaaatcctctatatcttgaccataggtagtaaatggactattaggatcaaaattttccggttttagtgcttcttctttatcaagccaaagctgcatattctgacgagcttcacgaaggccctcatcgatacttaaaaacgcatcgcgatctagtgtatcaggagatgtaaactgttgcatacgacgacgcgcctcttcgctacgtcgatacgtatcccatgcacgaagcaccatctctacgccttcacgataatcttgccattctttgatttgattctgaatttctgcttctgtatcctcggaagccttcaacgcttgttgtaattctacatattgcgtttcatgttcacccagtgcagataaacgagccttgttttcctgtagttgatctatcaaaacattgatgcggcgtttgcctgatgcagacgcaaccagtaagtcattagcattggtttcaatgctttttactacaccaccgagttgctcgcccccttcggcgccaaagaatctagctcgtacatctacttcattgagtatatctacgccttgaagatcctctaacgtaaggccgaatatgcggttatacgtttttttatcgagcccatgccaccacaattgattcggctcgtcctttatgctaggctcaccaggagaataaaaatctaaattcttattttgtcggcctaaatgataagccgtcccatctttgtcgagctcaagagatccacttacataaccatattttttatgtttaccgccaaacaaaagagaacgtataccttctaataaggaggtttttccactttcattagcgccatatacaagctgtacaccgttaggaccggatttaaatgtccagttttcatacggtccaaatgagtcgagtcgaatctgtttaatgttcatcgtttacccccattaacaccgtaaccccttccatttcactgcgttccataactcgtttcaatacatcgtctgataataaatctaaataactgccaagtcgtttagactcaggacgatcgaccaagatttgacgtacggcctcaatatcagtaacggtttcatcataggcacgtagataatcgcctaccatgtcggacaataaacggcgctctgccaaattaacagtaggacgcgttttagcaatcatgcggtatggcataacaaaaatagatttactcttttcctctgcctgcgtctcccgtagccataattttcgaacggactcatccacgcataagcgatgcattggaccagttcctactaaatggactgataccaatgtattcttattatattttttacgtaaggactgctttttatggctcaacaaatctaataactcacgttcagtttgtatgcctgcaatatcgatctttatatcttcaaaacgaatggcactggtctcaataaattctaattcacaatgtccattatgtgatacgttgaccatatagcatcctttagcgccagattccttccgatgtaatccttgaggattgcccgcatatacgaccatagggtcttctgaaatcacctgtgatttatggatatgacctaatgcccaatagtccatagcgccttgcatgatatccgtcaaattacagggccctgttacatcatgatgttcactgcccacactagatccaaccgttccatgcatgacagcaagggaaaactcatctcgttcaaaggctttatattgtgcagcaaaattagattgttcattgccatgaccacaactgatgccgtaaacaccaccaacttcaatattattaaccatcaacggaaatcgttgtacctgtgtatccgaaaacacatgtacattatcaggcattgataagccagcgcgccagctttcagcaggatcatgattaccttgcaccatatatacgggaatatgcgcttcccacaagcgatacatggcacgcacaaatcggacctgagcctctaaattatgatcttcactattataaacatcaccgctaatcacaactgcattaacgcgtttgcgcacagcgatttcaatgatattattgaaagcttcataggttgcttctgcgacggcacgatctacatgccgactcatccccatagcatattgaaaaggagcccctaaatgaaggtctccacaatgtataaaacgaaagggttgcatattgtctcctttcctaacttatagaatactaatatctaattatactatatatttctatataatatgtaagatatcatattgtaaactaatttatttatacagttgacaattagtatccaagaatactacaattacattgtaaatatattcgtttttataagttaacaataacaaggaggctataatggcacttccagtagagcaacaaacccaggtgggttcttatgaaaaaatattaaccattgccaatcgtatattacatggtggagaaatcactaaagaggaagccatcgatttaatccatacatccgatgaagataccatgattctattggctatggcagataaaataaaacaacattttaacgataattccgtagacatttgcgcgattgtaaatgctcgttctggtaaatgtcctgaaaactgtaaattctgtgcacagtcggcacaccacaatacaggcgttcaagaatatccatttatggatgatgaatcgattttagatgctgctagaaaagcaaaagaagctggtgctattcgcttctctattgttacaagcggtcgcaacacttccaaccctaatgaattcaaccaaatcttacgcgtattaaaagaaattcgcgaaaaaattggtttagaaatttgttgttcccttggtttgttaacctatgaacaagctcttcaattaaaagaagttggtgttactcgctatcattccaatatcgaaactgcaccaagtcatttccctgacatctgctccacacattcctatgaggacaagatgtctaccatagaaaatgccaaaaaagctggcattcgcgtttgttctggcggtatcttaggtctaaacgaaacgctagaacaacgcgtagaaatggcgtttgaacttaaacgccttaacattgattccatcccattaaacatattaaatccgattaagggtactccattcgaacataacaaagcgttaaaaccgatggaaattttacgtaccttcgctgtattccgcttcattttacctcatgcattaattcgtaccgctggcggtcgagaagtaaatctacgtgatttacaatcgtacgcactaaaaggtggtcttaatggcatcatggtaggcggttacttaacaaccggcggtagatccccgcaagacgatttacaaatgattaatgatttggaattaacccgtacagccgctcagctataaactaacggttgtttccaatcactagtggatatcttaaattttacctatctacacagactgtaacacccctgcgtgtttacaatacatttacacataaaaaatacctagctagttgctgtctagctaggtatttttatatttaattttttaaatttatatctaaaatattaaattcaaactatttattgccataacaatctatagatggcttggccattcgtattgccttcaatcggttcaggatctttatcataatcaacattatcatattgagtgccgtttggcatatacgcatctacctctagaatttccatggtccgattataacggctaatatataccttatagcgaagttcatcgccacctggttcattaacttttagccaaagaacagcatcataatcgcttttttgaacactatcattatctataaacaattgattacctttgtcatcaggacttacataataccaatcagtcgcttgtgctgtattcgaatatgttatgaggcaaaaaaaggccatcaaagctataagcaacttcatagtggccccctttctaacccaacaacaaaagtcttataactagaacgatttttttaaatatttttaaaaaaaataaagagaagatattatcctcctctattatcatatcaagaagtatggcatttatcaacatttaataaacgaattttacatttcatctaaatttcataaaatattttttagaagttcattttaccttcatagtatttacttataattactgtatcaaatgataattataagtaaatattccctgattacttaatgtatttatctcccgacaagtaatactaaccccaaacctactacttgtttaaatacataggtcatttgatgttaatactaacactccccttacatgaaaaaggactccatacggagtccttttttcgttgtaaaacctatatgctcatacagacaaagctgccctagggcagctttttgttttgcaattcacgacctaaatcggaaggtacaggtgcgataacagtcacctgctcagattgtccgtatggtgtaaatgttaacgaataggcatgtaaggcctgtctcgtatacggtttattccgcataccatacatagcatctccaatgatagggtgaccaatatgagccatatgaacgcgaatttgatgcgttcgtccggttagcaatgtaaactctaacaaggactgcacatcatcatattcaatcacacgatatttggttatagcctcttgaccaaattcatcaacacaacggcgattatcaaataccggatccacaccgataggttcattcaccacaccatcagatgtaatctttccttctacgagaccgcgatagacacgatgaattcgaccttcttgtagctgtttagtgtaatattgttctgcctcacgggttttgccaaacataataatacctgtcgtatctcgatccaagcgatgaacaggccgaattttatgaacttcgccgcgtttagcataatagccagccaccagattactcaatgtatgatatttcgtttgacctgctggatgaactagcataaatggaggcttatacaccacaagtgtgtgttcatcctcatagagaacctctataggtcctttttcaacctctacaccataatccttatcttgtggtaactcaatagtaataacatccccttttcttagcatacgcttggaatgagcaacgcggctatttaccttcacccgtttcttacggaatatcatctgcacatttcgagaggataaagaaaatcgctcttttacataagcagatactgttgtatctacctcttcttttactgtatatgttctccagctcatattaccaccattcgttgatatatgtattttctttaggatataccatatctagataatcaatccaatgagattcgccttgtaatttaccttcaaacacaagatctttagctgatacagcccccatcaacaggactgttagaccgccaatgtctatagtgatatcgatttcatccacagattcagcagaaacgcgttttacgttaggtaaagtgctttcacctagggtaagggcaaatacgccattattccaatcgcataatgtatcggtaaccttaatgtttagggtaattggcatcataacggcttctggattaacaggtaccgtagtcaacgctgtttctacgtctacgatacgcgccatcatatacggcatcgttgtatgacctgtttttccatcaggaacaaatctataacccgtatcatgtaacccttcattccagcgaatgctttcaccttgagaacgatggttataaaaataattaagcaaaccacgttgaacacgacgcgttgtatatacaaattctgtaacaggaatttcaggagcccctaaacgatagacggcgtaaccttcgatttgaccttcatcgtttttcacgaccgcaatgttcacaccttcagcaaagaaactgcctaatagacgtttccattccttctcaccccgttccgcatagccacataaatccttcgtataggctttgtaaacaggatcaagcaatgtccattgctctacatcatttagcaatccaaaggataaggttttatccgtcaaaggacgcaaactctctaatggcatggtctgtacccattgatgagcgtacaaatcccagccatattgttggtaaaatcccgctttagaaggcattaaaatggtaatgccttgaccacgacgacgcaattcttccaaggagtgcaacaataatgcaccacctatgccaccacgacgtgcggctggatgagtggcaacaccaaccatataactagtgggcaagatagcgccgcgcacattgatgttatattgacgcaaatgaacagtggagagcaattgaccttcttggatacctacgacagtattctccggctcataacagttagaaaaataatattgaaagaagggatcttcttttggttcaaagcaatacgcccatagcgcttcaacttgaggggtgtcttgtgatgtagcaattctaaaatccatacgatttcctttctatcctaaatagctctagagccatatatttcatattgtagaatgtatttcacacactctaccctttattataacggaaaagagtggcaccatacagtaccactctcacattcattattaaattgacctaattatttaccgcccgttgcattatctgcttcattagcatatacagcatcatatttttctgcgaaatgatctggattataagattccttcgcttgacgaagaccaggcaagcccatatcttcttcacgattgataaactctacattgctaaattcatgacggatgaattcattattaattgcttgatacaaaccgcgaatatccggattggctttttcgatgtgaattaaagccattctatcattcattaattcgccgatactgaaagcctctacgcgtccaaacaacttaatagcgccgccttttaagcccaagacatcccaatgatcaaagagtaaattaatagccactaattcatcttcaataccttcttcgtgatgagtttccacccaagacgctgctgtctcacggcataacggaatgatgtcttctgtaattggcacatattcatagttggaatattgcatacggaattgattcaagtgatttttcttttgacggaatttcttaccagacaaattgataagatcttcagacttataaatatattcgtagttatcacggtcaggtgtgaatacgtaacggcctgggcatagttcctccatccgttctttcacaaccttgctaacacctttgaaaatgaatggtaatttattttctacaaaccattcttttgcacgcaataaaccatcgaggaacttcgcatccttaccagcaaatggaggtaataggaatggatcgcgcttaccaccaccttggatgtacaatacgccattttcttcagcccaacgaatgccataagcttcttgccacatatacaatgtagtaaagcaattatccgacgcttcgtaatgatgttgttcaaaatatttatcgattaagggtttatctcttaattcaaaacgtttaaattctaaaataataatctcctccttttcaacattcatggttgctagtttctagctacacataagatatttattgaaccttcaccttttcacctagttcaaaggtacccttggttgtaataacttgttcgccttcattgaggcctgtcatgatggacacatatccatcttgttcatcccctacttcaacgacacgtacgtctaccgtattatcagcggttaatacatatacatatttaccatcttgattttcacgtactgccgcagcaggaataacgagcatcttagcttgagcactagattcgatggtcaaactataaaattcaccggccttaatagctcctttttcgttgttgaaagtagccttaactagtacacttggtacattttcaggctggtttgtatctatataggtcaactcacctggaatatctgaatcaccgacatgtaaagacactttaatacttgattttgcctctgggctagctaatttcatagccgcatcacgaggaatactcaatgatgctaccataggcgtctcttgttgtatcaacataaatggacgatctgcaatcgccatttgacgatcttcattgtaaatagcagtcaccacaccggctatgggagccgtaatattagcggcagctatctgtgcggatacttgagcaatttgcgcttcaatagcagcaacactagcaccgttgccaccaccgccaccaccagttgtggttgtcacagtttgaggtcgagaccgttctagaatacgattatattccttttcggtaatattaccagcctcgcgcatttggcgagcactttcaagctgagcactactaaccgtaggcgccgtcgttgtcgtcgttgtttcaacagcaggcgtataggattgggccgcactaagctgcccttgtagcgatgctaattgttgttgcaatgccgacgtatcaatcgtcgccaccacttgaccttgtgtgaccttatcgcctaccttcacagcatacgtagccgcacctgatacagcgggcgtaatagtggacttattaagagctgttacattcgcttcattatgaatttgtaacggcatatctttataagtaacatcggcaacggataccgtagatgtaccacaaccagtaatcgcacatacaacaatgaccaatagtgccattacagcaccaagtcgaaatttgttcatactttcaccttatctctatccattgtattgatttttatcaataccttagtatatcacaaaatcaataagaattgtatgaaagctaattccctatatgattagatattactagtcagaaataatatctgatataatattcctgaacaagtatacatatggaggtttctcatggaagaacgtatggattttagaattttaaataatggtagctttgtgccatccatcggatttggcacctacaaaacaggaacgtcggaggaaacggagcaagctgtaacgaatgccttacaggctggataccatttactcgatacggcagcttattatgataacgaagaagccgtcggcaagggcatgagtgcatctggtattaatcggtccgacatcattgtaaccacaaaaatttggcatactgacgcaggctatgataatacgatgcgcgctgttgaaaactctttaaaaaaattagatactaattatatcgacattatgctcattcaccaaccattgggggattactacggttcctggcgcgctatggaggaattatacgaccaaaacgtactacgcgggttgggtctttccaacttctacgaagaccgtttaatcgacttgctataccactgtaatgtaaaacctgtagtgaaccaaatcgagtaccacccgtttaaccaacgtcaatccttattacaattaatgcgtaagcatcaagtagtaggtatggcgtggtctccatttactcgtgatcgccagcctatatttgaccaccctatcatcaagagcttggctgaaaaatatggaaaaacgaagcatcaaatcatcttacgttggcatatccaacgaggcatcattccattgccaaaggcaacaagcttagagcatatgaagtctaactttgacgtctttgacttcaaattatctattacagatatggagctcatggagctacttgatcaaagagcgtttttggaaaatcatcatactgctgcagggcttgagcggattttacaactaaaatagttatagtttatgaatcctcgcatgcttatctctagcaacatacataaatgaaatatcccctccgtcaagcctccaccggccgggtctgacttcgccctgcgggcttcgcagggccaaagtcgtttgacgaaggggatctttcattaacataatactctcagcacaataagaatgcgaggattcatgtttactctaactaattttataaattaaaatccgctcaaatccagtaatcaatctatcctcttttccaaaaacgctctttgattcgggagtaatattaaatattttgtacgataagcatatacactatagtacctacggcaatggatatgagcatgttccgtttccaaagatgtaatcctactgtaaccagtaatgctatcaattcagggataccatatgggtatgctaaaacgacggtttccttaaaggtatatacgacgagcatacccataacggcagcgggtaatgctttgcctaaaaagagtacaaaatctggcgcctttttcccaggtgggaatatgaggaacgccccaaaacgagtcaataatgtacctgctactacgatagcaacggtcataaccatttctatattagtcaaggcgcacacctccccatttgtacgcaatatagcaaactaccagcatacagctcatagataaaagcataaagagagatttccccaccaataagagcatggctaccgccatagctgcaccagctacaccaaaggctcgaatcttattattctttgcattaagtagcatttcaagaaataccacaataaatagcccttgtaacacgaaatcaatgcctcgtaaatctacagtagtcaatagattaccaaatagaccacctacaaaggtactaaatacccagaatatatagttaagccaagacacgtggaagtaaaaccattttttatccacatcatccggtaatcttgtagacatgttgatagcaaagctttcatcacacatccaagcaacggtaggaaaccacttccaacccatatgaacatatcgttgtagcgcagataaaccgtagaaaaaatgacgaccattaacgaacatggttaaaacaaaggcattaataggatcaaatccagccatcaacatacctatcgttacaaactccatggatcctgcaaaaatggttgctgccaaaacaggtggtgtccaccaagggaacccttggctcgtagcatataaaccaaatcctaagcctatgaaaaagaagcttatgcccataggaatcataataggaaaagcataactaaaagcttgacgccctttatgtaattgttccattaatatatcgccttctttcatttacactagattatgatattcataaaatgtatataataccatcatattctccatacaatgtacaaagaaaagacacctaccaggtgtcttttctaatatatacactattctactaattataaggcacgcgttaaaatttcgcgagccacttctggtgtgacatcacctttttcaccaagtcgagtcataccatgaccttctaattgttttacaattttatcaactgcttcttcgcctagaccatagtcttttaaatgcgttgatacgccaagagactcgaagaattcacgcgttttagcgatagccttatctgctttttcttctgttgtaccttctgtgatatgccatacgcgcgtagcatattgtgccaatttttcaagcttgtctgcttttttcacttctaacaatgcaggcaatacgatagctaatgtaatcccatggtcaagatggtatgcagcagtcaattcatgaccgataagatgtgtggcccagtcttgtggcacaccggcaccaatcaagccgtttaatgccaaggtagaagcccacacgtgattagcacgaatatcgtagttttctggattttctaccgtttctttaccgatttcaatcatagttttcaaaatgccttcgctgaaacgatcttgaatacggccttccacagggtatgttaaatattgctctgtagtatgtacaaaagtatcgatgacgccgttcttgacttgtttttcaggcaatgtgaaagtcaacgtaggatcaagcatggaaaacttagggaatactaagctactgaatacagggtatttaccatcaccataggtaataacggcaccattgttcatttcggaaccagtcgctggaagcgtcataactgtaccaaatggtaatggacttggtaccatttccaccggaacctctggtacaccagctttcataacttcaatgacaggtccattataagtagcgcccataacgataagttttgtagcgtctactacagaaccgccgcctacagcgagaacgaaatctactccatgttctttaatgaaagctactgcacgttcacacgtttcaagggatgggtttggctcaataccgccgaattgctctaccttgcggttgccaagggctttcacaatacgatcaatcagaccactgcgcacagcagatccaccgccgtaagtaatgagcacctttgcatcctttggtaccaatgtatctaattcacctaaacgatctttaccaaatacgatatgtgtaggattataaaaatcaaagttaaacatagggacctcctaagtattatgtttgtattccaccgctttaattgtataaaacttatctgtattatatcatatttcgatttttttagatatgtctagataacgctactttcaattacttaataactctactttacaatcatcgtaggagccatagttttaatctatatccaacccttatatttttatctatatacaaaaccccatttacatgataggatatatccattatatgtatatagaaagggatgttcacatgaaattaaagaaatttattgcccctcttctcgttggcgttttagcattcgccatcgcaggctgtggcacaaatacaaatcaatctagtcagacaccaaaggaaattaaaatcggtgctactgcaggccctcatgctcaagtagcagaagcagttgcaaaagaggctcaaaagcaaggtattaaccttaaggttgtggaattctccgattatgtaacaccagacaaagcattggctgatggagatatccaactcaacgcataccaacacgttccatttatggaaaactttaacaaacaaaatggttccgaccttgtagctattggcaaaacgattttaatgcctatgggattgtatagtaactctgtacatagtgcacaagatgtaccaaatggcgctatcgtagctattcctaacgatccaacaaacggtggtcgcggtctcgcattacttgctaaggcaggtctcattacattgaaagatggcgttggctttaaagcaacagtagcagatattacgtctaaccctaaaaaccttcaaatccaagagcttgaagcagctcaattgcctcgtagcttagacgatgtagctgtagcagctatccctatgaactatgttcaaagtgcgggcctcaatgtagaaaaacaaggattcttcttagagccaaaggatgaacctttagctgttatgatacttgctgtacgtagccaagacaaagataacgaaacatacaaaaaaattgcggatatttacaaatccgaagtaatcaaacaatttatcaatgaaacatttaaaggctccattacatcagccaactaacataaaaaatctccatctgtttaggatggagattttttagttatcatcgtacatataataaaacaacgctctacacatatagagcgttgtacataatgccttattattcttctgtatcaaatgtaacatccaacggttggcgttccacaatattgcgatatctcaccttaggatagcccatcaagatgcctccagcgatgattttatcgtctggcacacctaatatgtctaataatggtttatattcagcttcgcctgcatgttcaaagaaccctgcccagcaggttccaagacctactgtcggtgcatataattcagcataagataaacaagaatgccctgaatcatgagtgcgatgaatgtcttttttggatccaatggcaaccacgagagctggtgcatcgcggagaatatattctttccccttatccacttctgcctgagctgcacgagcataaagacgcataatcggtactgtctttgctgctatgtgcatccattcgagaacaagatccgcaatgcggcgtaatttttgtttatcacgaattacgatatatgaaattccttgcgtatttgtcgcagttggcgccatgcgagccacattcaataccttgcgaatcaattcagcaggaactggtttattttgataattacgaatggagcgacggctgcgtaaaaatagctctgcttgttccggtgtaaatttagtttcttttgtaatatccacttgttcagcacgcggtgttaggtcgctatctagagcaagcgtagggcatactgcaacacaatgaccacaggaaatacaaccacccttacctgttttaggaccatcatcagtcataacaagaaggcctgttggacaatcggctacgcatagaccacaacgagtacagacttctgtattcacggtaaataacatagtaataaacctccaaacacatactataaagcctattataccatataaaatcaattcgtaggataacaaaaaaatataacacatatgttaatgagttaatctttacgcataaacatatgtgttatctgttcatattattcctattcgaaggatttaattaagtccatatattgagtcttatgagtcaatcgccaagaaccaaagtccgcttctggtgcctcattaagtatattggctaacgcctccataaatgctggaatttttgcagctacaatattcccagccattttaccaaaactttcagaacccatatgttctgaaccaccatctacgatgatgaaagcaggttgtggtttcttatctacgagttttacagcaccgtgaaatccaatttccccaatttgatgagtcccacaagaatgtgggcaaccagaaatatgtactcgcggcaattttttcgtatcgatacctttttcttcaagatgatcaaaaatggcctttaacaaaccattagaatcttgcataccgatttgacaaactgtagagcccacacaggatacggaacgacgaaaatcatcacgtgcgctatcatctgttaattccgcaatttttctagcttcgtctgctgtcagattgatgaaaaacaaggcttcatccggtgcaatgcgagcctctacttggtctagtgtaactgcataatcaagggccgccaatatatgttcaacgttcgcatcgccaccaactggatggtattccacaaagtacagaccttcttgtttttgacgatgaatacgatgattttctaccgaatcatcgcgcttgcccgtcttcgtaatttcataagcataatctgcaggattaatggtcaatttttcaacctctttcaccattgccaatgtttcttcataggttttgatgaaagcttccgcgccccccatttctgcaggcatataacgggtacgtgctttgccacgatttttaaagttaccatggtttgcaaataccatgagcatagctttcacatgatacaaaacatcctcaggttgcacatcacgagctacgggaataccgatgcgaggattaggaccaataccaccacacgcatatacatcaaaggtatgatgttttgttaaattgaaccccaggtccttaaaggtagcatgtggtgtgctatcaaatccattatcgatacccatcttaaatttacggggaatcttgatataaaacatttgctccataagaaattcgctaatggctgccgcatatggtgaaatgtcaaaggtctcgcgaggatcaatgccgcgtaagatactggctactacatttggattatcgccgcctgcaccgcgattataaatgccatgttcataacattccttgaagagttgtaaaatagtttccccatcgagtccatgcatttgtaaacattgaccggttgtgaaatgaatatgtgtaagattgtacttgcggatagtatctgctaagaaccgcatttgttcttgtttgatacgaccacaattaaaacgccaacggctcatgcccgtagcagcaccacgttcggcgtagctaccatatgcgccggactggcccttatagtctgcaatagacatctctttcttataaaacttgcgtgtcatatcttcaaactttggataatctgcaatcaaacgttcttttacttcttctgtaatcatagtactacctcttggcttatatttattaagcatatatagaaacttttatatgtacattatacgcttatgtaatacttgaaaacgtatccatagtcacaattatatatataaatatttgtattttgatattacaaaatgtaataataattattttcgattgtaccgaagaagggcataaattcaattgcattacaatctatgcattctactacaacacatagtccaactacgcaaaaagcagcagacctaatgtctgctgctttcacaatcaatatgattatttaactattattcctcaccttgtgtaggattgttatacgcatctttatcaatggtgcccataattttatctaccacaagtgcgtttgttaaggaaccggatacgttcaagcatgtacgtcccatgtcgattaatggatcgattgcaaggattgggctgatggatgtaaagtatgcaccaagaccagtaccactaagggatacggatgcagccattgtagccgtaccaggaacgcctgcaataccaacggaaccaatggcgataacgataacgctcatgatgtacattgtcaagtcaaatggaatacccgctacattagaaatgtaaactaccacaagagctgggaatacgccggcacaaccttgcatgcctgcagtagtaccaaaggatgctactgtattagcagttgtagcatttacaccaagacgttttgtcaatgtttcaacagtcaatggcaatacacccatagaggaacgggatgtgaaggccaacaataatggagccttcgcttttttaaagtatgtaatcgggttgtaaccaaagctagcaattaagatagcttgaacgacgaacatgatcaaaagacctacgtaaagcaatactacgaaaagtcccatatcgaggatggcttgcaagccacgtgtcgccaatgtagatgccaataaagcaactacgccgtatggcataaggccaataatgaaatcggcaacccaggaaatcaattgatgaagctcatcaaataactttgtaaagatttccatgttattagtgcccgtttgttttaagagacgagctacgctgcccaagatgatggcaaatactacgatgccaataacatttgtttctgcagcagcttgaataggattgctaggaatcaaagcacggaatgtatccaccatcggtttgatttcacggatttttttaccggactcaacaatatcaaaaccttgacctaatccaaaagcattaccgaggataaggcctacgatagcggctacagccaccatgccgaggttagtggataccatggcaactactaacttcttaagattagcccctgcctccatatgtaaaataacatggacgatggagataaatacgataggaataacaagcatgcggattaagtcgatgaacccaccacccacaagggagaaccacttcgtactttccttgatgtagacaaccttagatggatcatcaggaaaaccagcaataacttgaattgctacgcctaatacggcaccaacaatagtgccaataataacaagattaccaaaggatgtccccttacgttgcaatacataaataccgattaaggcaagtacaaacactgcgataataccaatacttagtggattgcttaacatgaggtaatctgtaaagaatggaatattcataatacacctctttaattcatatcataataataggttatgaactaagtatagcatatatcgaaaattttgcaagtaaaacaatacgaattttatgagtttatctatgcagaatccgcaagctccataaacatgttaatttccatcgctctacaggagcctatacagttctaagagagctctacaccataatagaaatcaacacatataaaaaaggtgaccttcctaaggaagatcacctttaaagtgattcagttatagctatacgtagttaatgtattagcgcttaaccaaaacgtaagttacttggataggaccatgagcaccatctacagtaaccaactcaatatcagctgtacgggatggaccagaaatcaagcagatatttgtagggaatttggatggatcgttatgataacgttcagacaaatgttccattgtttgagtcatacgtggattgattgtatcagtgtacaatacagcaatatgtgttgtaggcaacaagctgatagcacggccagattcttcaccagatgcttgtactacagtagctgtttcagcaataccgcagtatgggaatgtaataccaatatctgcattggcagtgttggagatacattcttcacggcctttagctgggtcccattggaagtatgtacgagtgccgccattattagctgcatcttgttcgaataattcttttaatttatattcgtctacttcagaagtgcttgggaatacaatcttaccattgccccagtcttcgatagctgccaaaattgtttcacctaatttatcaggtgtagtttcaacgaattttgtaccaacacgttgacattgttccttaaacattgtcaaaatttgatcttgattcaaatctttgaacatagtttcttgaggaccatggctgtaatcaaaaccctctacaaatgcagggcacatttcttgatcacggcctaatgcacgagataaacgtgcaataaattgtttacgtttagcttcatccattattttttctccttcttcttgttcttttcatgttcagcatataagtcacggaatttcttgaacttcaatgtacccatttctttagatttagtccagccattcataaccggaatagcttgagtccatgtaggcatattgccttctttattactaatcaagttcataccgatagcaccagcttttgtaccaaggtcgaataatgtggagttaccaaacatcttagccgctgcagtgaagattgcttcttctgctttcggacgagttttttcgatgtcagccataatatgacggtgttccatcaataattcatgcaatggaatagctactgggcagttttctgtacatgcaccgcacaatgtggaagcatatggaagatcgcctgctacgtcgtaacctttgaacaatggagtcaatacagcacccattggacctggatatacggagccataaccgtgaccagagatgtgacggtatacaggacagatgttcatacatgcaccacaacggatacaacgtaacatttcttggaatgtaccacccaagataccggaacgaccgttatcgataatgatgatgtgagtttcttcaggaccgtcagcttcgccagcacgaccaggaccagtcatcatggagaagtagttggaaattttagaacctactgcagagcggttcaacatttccatcattacgtcaagagctttgaagtcaggaacgatacgttctgtacctaagaagattacttgagtcttaggaatggaactagacatacgaccgttaccttcgttggaaacgattgtgcaagtaccagatgcagcaactgcaaagttacaaccgttaacacctacgtcagctttcaagaagcgttcacgtacataaccacgtacgaaatgcgtcatttcagtaggattttcagtacctgtataacctaatttttcagcgaagatttcgcggattttattacgttcaaagtgaaggcctggtactacgatgtgagatggtgggctcactgcagtttgcaaaatgaattccgccaagtcagtttcgtttacttcaataccagcttcttcaagaacttcgttcaaaccaatttcttcagttaagatagttttggatttaacgatcattttagcttcgcgttcacgaagaatatctaaagcgatttgagttgcttctttatcgtcgaatgcaaagtgaactttagaaccagctttttcagcgttttcagcgaattggtttacatagtaatccaaattgttaagaacgtgatcacgaagtttagctgcttctgcgcggaaatctaaccattcaggaacgtccgcaactactgtattacgtttatcataaaacacgtcttgtgcttttttgatagctgcaactttgaaatcatcagccaaacattcttttatacgtgttttataggggcgattgtcatatataagtgccatgtcgtctcctccttagcggcagtttaagatttcagcaatatgcattactttgatacggcgatcgatttcaccatctttatgaagacggtcaagcatacctgcaatattcatcaagcaagcttggtcggaaccggaaattacattagcaccagtgctagcgatttccaaagctttttcgcgtgtcattacttcgctgatttctgggtttttaacggagaatgtaccgccgaaaccgcagcaacggtctgcacgaggtaattcaatcaacttaaggtcttttacattgcgaaggagtttgaaaggtggttcttttacacccatcaagcgagttacgtggcaagatgtatggtatgtaacagtttcgtcaaagcgtgcgccaacgtcttctacacccaatacatcggtaatgaattcagtgaattcataaatttttccgctcaatttttctgcgcgttgttgccattcaggttgaccttccaagaagtgttggtattcatcgcgaatagcaaaggcacaggagccagacatgctgactacatagtcagcgttttcgaagcattcgattgtattcttaatagcatccatagccgcatcattgtaaccggagttagtgaacatttgtccacagcatacttgtttcttaggcactacaaggtcgcaacctagtctctcaagtacttctacaccagccatgccaacatgagggtagaacatatcaatcaaacactgttggaaaagatgaattttcatattttcgtcctcaacttttctagtacttaactcaaaaaaaattttgatatgtatccatttaggtcgataaaatttcacaaattatcagcctatacaataaattgacgatctttaaagtgttatatttaaagaacatttcgatataattataaataagggcaccataaatgtccaagcaattgctatattcgtatttagggttgcataaatcatatccttatgactaaaagtaataatcaaaattgatttttatcacactcacgtactgctttataaattttttctataactcccgtgttttctttatttgcaaatgtttatcaagtagatattttttagtcccaaaattgcaccattctcatttgctataatgaaagtgtaactttcaccattattcatctaatttttatccttatatattacattttcttatagtagtggttatttcataaaagtgctataatttatgtatataaacgtaatttgaaaggagctttctcatgaaactcaataaattgtccttatctctagcgattacattggcgctaggatctacattcggcatggctcatgcagaaactacaacaactacgaaagcaccagttgtaacgaatgcaaaagcatctacacatactacaactgctgcaaaaacaactgctaagacaacacatgcaaaaacaactgctgcgaaaactacaccagcagcgacagctaaatctactacaactacagataaaactacaacaactgcaaaaacaacacaaaaatctgaggctcctgcaaaggctaaagaaacattgccagctggcgtatacccagatacaaaggataactgggctcgcgatgccatccaagcaatgacagaggctggctacttatccggctatgcagataacacattccgccctggtaaaagcattactcgtgaacaagcagcagccatttacggcaaagtgttgcaacacaatatgaacgagcaagaacttgctgacttagtaacaaaagaaaatggcgtttcctattccgatgttgaaagcgaccgttggtccaacacagctattaaattagttggtgctgctggcgttatggaaggtacaacaaaatctacatttgcccctgctaaagcgatggaccgcgaagaattcgttgcttccgcagctaatttagtaaagaaaataaaacctgatgcacctgtaaaatccgaaaaggttacattcaaagacagtgctagcatttccaaagcttatgtagcggatatcgaatacatggcacaacgcggctatgtagcatccggtgcaacaactgctttcaacccaacacaacctgtaacacgcgcacaagcggcaacaatcttaaaccgcatcttaaacggtgaaacagcccctactactagcaaggctaccgctattaaagaagatgcaaaacaagacgctgaaaaggttgaaaacaaaactaaaaccgttgaaaaagaagtcgctaaagacgtaaaagcggatgctaagaaagtagatactgctgcaaaggcagatgcaaaaaaagttgatgctgctgtgaaatctgatgctaaaaaagttgatgctgatgcgaaaaagatagaaaaagaagctaaggctaaaaaatctgacaaggtttctgagtctaaagcagaacaatctccacgcatcgttcgacctgtacgtcgcagcacattaaaaccacttgatcaaaaacaacaagaaacattggaaaacaatgtattcactcaactcaacaagacatataaaacaccagaagcgttccaagactatggtgttatgtactggagagacaatcaattgcatgtagctttgaaatctaattccgatttggatacagttaaagctaatttggcaagccaaggcaatgctactatcaacaactatgtagtagttgaaccatctcaatacagccaaactgaatacgatgttatcgaatctaatttccgtaactactacagcaaaaacgaaaaaggtggcaatattatcgccgtattcccagacgttgaaaacaatcaattatacgctgtagttagcactgcaagcaaagaaacacaacaaggtatttccaaggtatttggttccaaagttaaaatgactgtaaaacgctaatagcgacaaaactccgatatactttagtccttaaggggacttcaaaaacagcgttatccaacgctgtttttgatatatttaccacatgattaagaaggatatgtatgcaacaggtatcaacacacacattacgggctctcatcctgtccgctttacttactacatccggtatggcatttgccgatacaccggcacaaacaccaaacgctaatccagcgcaacatactgtaacaacaacggcaacagttcaagatacaacagctactgaacaaaacaaaactgctgtacctgctaatactgttgttaatcaacaacttcgctccggcgttgttacgtctccaaaggatatccaagatgtgcgaccatacatcttctccgatgtaccaagtgatttttgggcttctaaatcaattagtgccgtagcaaaggctaaattgatgaaaggctatgcggatggcacattccgacctaatcaaccaatgacacgcgaagaagtggcctccctattcaacaacattaccgatgatggccaagcagcgttcatctctagtcactttaaagatattacatccgaccgttggtctgccctcgctattgaatcagtagcgcgcaagaatatcatctctggctatggcgacactacatataaacctgaaaaatatatgtcccgccaagaatttgctgtggtagcagataactacctacattatctaggctatacaacagatgaccctactgtactcgatcaagtagcgtatggggaccaaaaattcgtagccccttgggcacaagacgcagtgcgtgaattagcatacttaggatttaccaactatgcaccaggcacgatgtttaacccagaaaaatacgtaacccgtgcagaggcggctgaaatttcctaccgtatgacacaaacaccacaagcattggcattccacaatgcgctctaccgtcaacaagtggaacgaaaaacatccaatgtcatcagccacgcccttcactatggtcaagacttcacacaatttagaaacgacggtgctctcttctggaaggaaggtaaattgcacgtttctgtagtggacaaaaaacactttgatacagttcatacagcactagctgatgctcacgatccacaactcgataatgcattaattgtaagccaaggcaaattgacacaagcccaattagaagacctccaatccgatgcattggctctatatcaaaataaagaacctcaaggtaacatcattagtattttaccaacagatgatgcatctgtattagttattacggctgattctgtacaacctggaacagtaaaggcatttaaaaagaaatttggtaagaaggtaattgttcaaacaccgcctgaggaaattccgactacgacaatccaattcccattaccattaaaaccaacaaaataatccgttaggcagcccttcggggctgtcttttttgttctcctatcaccctattcttcatacaggacaacacacacaaaagcccctccgcacatcgcggaggggctttttagtaagtattaagttctataccacataaaacagtctgtgtaccctttttggtgctacgcaccttgcattgtttaacaatacagacacatatagttagttttgttatttggtcacatcattttgacggtcgcgcaaattgccaactggtacatacacggtaccagcactatggattgtatccacatcttgttgaagaatcatcactaccgaataatcttcagttgtgtagaattcagatggcatcttatcgaatgtagcattcgcaccaactgcatccttcacttgttgattattattgatagcattaacgagttccttcttattcaaaccaccaaggtcatacaaggataattgacgacctgttgtagtattgaatgtaaagccttttacatagttcacaccatttgcatcgccatcacgcattgtataggtgtgaatcaaaacgctaaagataccatttttatccgtttttacatcatagtacatgatgacattcgttttattggattctttttcgtttaatttttgagtgtcattttgaaccttggaaacgtatttcttaatcgttgtattgatggctttttcaacgatagggctaacagatttaacctctgggaatacgagattcaaatgatctgtagtcgcatctacaggagatacgcctacctctttacggtccatataacggtctgcatttggcgctaccacttcgatagtaccacgatcagttttattcgctacagaacgtaattttttattttgctctggcgtagccgtgctagagagacgatatgtcacatcgtgacgattattttgtgctactacagcaccagtatcctttgttacaggaatcgtttcactagcggctgccatagatgtgagtggcaatgcggcagccatcatgatgagaacagtctgttttaatttcatggttaacctcttactttgcttgttcttgctctgctttcatagcgagagcttctgctttatcaaatttgtgagttacaacacgacgaactagatagaatgcagagaagatgaaagcaagtagacctaaccaaccagctgtactttcaaattcaggaccaactaattcaagtggagattcaccaccaccagttgtaactgacaatacaataataacagctatgattacaccaatcaagctttcaccaacaatcaaaccggatgcaaatagaacgccacgacggttagattgttctacatcgtattcagccaattcaccagcacgcattttagcgcgagcgatgaggtaacgacctacgaaatagctcaagaaagaaccgataataagaggtacttccaatgttggaggcaagtagatacccataccaacagccaatggaggcaatgttaaggaagcagttgtgctcttaagaatcaagttaacaatgattgctactacgccaacaccaacgccgatcaagatgtaattccaatccatactagcattgaaaataccttgagcaattgtagtcatcaatgttgcttgtggagcagataatgcagcatttggatccatttcagcacgaggcaacgcacctgtgaaaccatatgcttggtataacaagttaagaactggagcaatcgcaatagcaccggctacggaaccaagtaacaatgcaatttgttgacgccaaggtgtagcaccaacgagttgaccagttttcaagtcttgcaagttatcgttagagatagatgcaatggcgataactacggatgtcataaagatagccatagctgtagcgaattgaacgcctgcttcggtagcaaacaaattattttcagaagcgatgaagtataccactagagaagaaataatagttgctaggataccaataccggagattggagatgcagatgtaccgataagacctgccatgtaaccacaagctgctgctacgaagaagccgattaataaagctactacaacgcctacaacaacaagagtccacatcaagcctgcactaataggtacagcggatacgaaatcccagaacgtaataaccaaaccaataaggatgatggcaaatacgatcaatacagattttgtgctcatatctgtatccatgcgatgtgtttcgcgttcagcagcgctgctattcatggatttaacggaaattttcataccttcgatgataggtttaatcaaggtaatcaatgtccaaatcgctgcgataccgatagcacccgcaccaataaagcgaactttagatttccagatacccatagcaaattttgcagttgcaccaccatctggagcaaatacattagtcaagtaaggtacaaagccagcccacgcgatgagaacaccaacgaggatagcaataccagatgcgataccgataaggtaaccagcacctaacaacgctgtggagaagcccaatggaatttgagtaatccctttgctacctactggaagccagaagctcatgctatcgccaagaactttgaagccgttagcgcaaaggctgatgataccagctacagcaccaccggaaacgatgtctgccataccggaaccagatttagcaacttcaccaccattatgagatccgaccttcaagatttcggctgctgcacggccttctggatatggtagatcactgttcactaccatggcacggcgcaatggaatggtgaataacacaccgagggaaccaccgcatgcgcaaatcaagaatgtttgccagaatgggaacccttgccaataaccaagcattaaaagacctggcaagataaaaataattgcagataaggtaccagctgcagatgcttgcgtttgtaccatgttgttttcaagaacgttagaatccttgaagaaacgtaaaattgccattgagataatggctgccgggatggatgacgagaatgtcaaaccgaccttcaaacctaagtatacgttagatgccgtaaatattagagtgatcaatgcacctaataacatcccacgcaacgtaagttccggcaagtgaaggtcatggctcataaaatcatgtttcataagtacttacctcctcttataaattaaataaaactaactataagctatattcattttatcgtgttaaagcgatgttgacaataaatataaccatatatgtgctatgtatacacaaatttatagatataaatcaaatatgtataaaggtaatagccatgtacgcattatatctaattggtatttattatcattttctattatattttttcgtttttctgtatataatagaaaggaaccgacgataaggtcggcatgtcttttaaggaggttgtaaacattatggaaacaagaattgaatatgattcaatgggaccagtcgaagtcgacgctagacgaatttacggacctcaaacgcaacgctcgttcaataactttaagatcggtgaccaccgcatccctattgaacaaatcaaagcgcttgcgcttgtcaaaaaagcatgtgctttaaccaatgcaaaatgtggcgcagtaactgaggaaaaagcgaaactcattgcccaagtagtagatgaaatcgtagatggcaaatgggatgaggaattcccattgaccgtattccaaacaggctctggcacacaaacaaacatgaatgtgaacgaagttatcgctcaccgggctaaacagttagatgaatctaatccacttcatcctaacgacgatgtaaaccgcggccaaagtacaaatgatacattcccaacagcaatgcatatctgtgcgtactttgaaattacaaaacgcgtaattcctgcattggacggccttattgtatcctttgaaaaattgcaagaaaaaggcaaaggcttgcaaaaggttggtcgtactcacctacaagatgctactttcatcatggtagatcaagaaattagcgcctttgtggatggcctaaaaactgccaaaatgatgctccttcaaaacgctgattatctactcgacgttgcccttggcggtactgccgttggtacaggtgtaaacacacctaagggatatctagatgttatggaaaccgtattgccagaggtaacaggcgctccattccgcgttaagaataataaattccaaggcctatccttgaaagatgcgttcatgatggctcacggcgcacttaacacattggctactacattgtttaagattgcgaacgatgtccgtttcttaggctctggccctcgctgtggttatggcgaatggcatctacctgaaaacgaaccgggctcctccatcatgccaggtaaggttaaccctacccaatgcgaagcccttgctatggtatgtgcccaagtattcggcatcaatacaactatgacgctttgtgcaggcagcggcgcattccaattgaatgtgtacatgcctatcatgatctatgattttgttgaaagctgtcgcctcctcgcagatgcgatgaattccttcactacacactgcatcgacggcgtagaattcgtacctgaaaaacttaaattcttcgtagaacaatcccttatgattgctacatccttaacaccatacatcggctacgataagagtgctaaggtcgtaaaagaagcatacaaacgcggttgctctatcaaagaaatcatcttggaagaaaaactcatgaccgaagacgaattcgccgaagcagttcgcatgaaataaaatctctcacatctctttgacatatctataacatcctctcatacctcaaatgaacggaaaaaaggacgccatagttctaaatcattcagtatatactactgaagactagactatagcgtccttttttgttttttaccatatttatcacaaattcttcccttttgcaaaaactcactctaaacgaatccaagtaaaaatacaatatttaataataggttaaaacatataaatatatgtataatactactaaaaataaccaagaatataatgcgcctttaaataatttctgatgcttttgtgtttcaactgcatcataattttcactactaggtatataatatattccaatcaaagaaatcgccataacaactgaagaccaaaagaataatacaaatatcgaaacgacttcatgaagtaaaccaaacccaagccatatagacatacctaacattgccacaattctggctaatgaaagcttaccttcatgagtaattaatttatatgcaaaaaatattattcctattattataattaagtcctgaagcattacctatctatatccctttttaatcagatttaattttatctttagcacactctcatttaccgcaacaaatacaaaagaaccaatatttctagcaacgaccttctaaatataaatcttataatagaattacatgattaggcgtcttatcaaatggaattacatattctgaaagacttgttagttcttcccaatcattacgacttataacatataaatgaagtccatcatctttttcaactatatcaactcgcccaccataccatggtcttttatatgataatatcttgctttttatatctccattgagattaaaaatctgtaattgattctctgcaacagctaaaccatatttatcagtcacaaatacgtcaaaatacagaacagaaatagggttttgaatctgaatctttttaaaatcatctaatatcgtaatattatttgtatccaaacacactaatttttcattatgaggaaatgactcttttatttcactttcataaacaaaatatgcaaatttttcatcatagtctgctatttcatctataatacgaacagaataatcaatcaatgacaaagatactatgcctttattggtacgcattaaaattatgtcatcactaaatttatataactgataaaaatagaattccttaatatttttgggaataggtattaacttaacaaaatgggcatcaatatctacaaagcaaaaagacgactctaacttaaatacaattttatttctcaccatatctgtgtaaattgcttcaataagtaataattgttcgcctatataaattctattaacttctctccactccaggtccaaaacaattaaaccattaagtttatcatttataatcatataatttacacatcgcaaagcaaaaattataacattttctgaacttggactttttatctgcttaataggttctaattctatcatctacattccttctatagtttcattagattataattcaggcctttttacattaaaagtaatccacactctctctgctctataatatcttttaaactcctcccatttattaacagattttctaataatggtaaaaaatcattacattctgctaaaagctcctcatctttccagagttgccataacgccccataagtaacaatcccatatgtggaatcattataatatatttctaactctctgttacacctcaaaccttcaataacttcatcatataaagaagcatctgagtcactcattgatgtttattcctccataatttatcttgtcgaatatgctctctaccaatcaccatataaatactgatattaaaattattacgcttgccattttcaaaccatttacttaattaacgtgaaaaagactgcaggggaagtaaaagattccccgctatatcaagtactaatactaaaaatcataatattgactcataacgcaatatacatcaaattgacgtggctgcatcgatccactcgttacttttattacttcattctcccaatatggtaatacttcttcccaaaagactgacatagctaaggattgtaatgttagatctctacaaaataactcatcaatatttttaaagattatcagaatagatttatttctatcccaaaacactaaatctctcatccaatcggaaaaagcagcccaattatcaacccgtgtaggaaagttaaaatataacccgaaataaaaccagaacttatcttctgttgttatatctttacaatcaagctctaaaacagaatcatagttattacgtagattatccatttccataaatccatcataagagacatatgttaatttatttatatttttcacttgtttatgacctctatctattcaaaactcaaaaaatatacatagatttttcatcatacagttcattatcaaaaatatcgcttattgtgtatccttctaagcagggtatcataaaaaagtatctaaatcaggttctttaacgacatattcatcatatccccactattttcttttacgtcctaaatatttataaacataaccccacccaaaataaaatactaatattgtgatataagaagcaataaagaaataaatatcattttcatcttctattatttcaggatttataattagactaacggtcatacctataaaaagaaagatgaatatacctcgcacaaaataattatagagttttaaaaacatatgactactcccacgataaaaactatactttcacaacacaattaaaatttcaactctaatatatcataactcttatataacttcatataataaaacgaggtatcgtataccaaatacaatacctcgtttatattatgaactttaatcatctaaaacggcttaaatattatagctattaatatagcaaagccactgcctaagccaccccgtcaaagaatgtaataaccgtaatttctcgcggacagttaatacgaatagggaaccagtgtccagatccgttatttacgtagcatacgctatttttttctgtatagcgaccttttacatatggtgtaccaatcggtacccaaggcataccaaagagaatgatttgtccaccatgggtatgcccagacaaggttagtggcacattgcgttcgatggcttcatcaaagaattctggatggtgggccaacagaataacaaaggcattattagggataccggacaaggccttatcaatcatggcttcacggttttctttacgacgttcattgtcatatgatacgccagcaatatagaccggttgtttaccacccatgatttggatgttgtcattaatcaatacgtttaatggcgtttttgttttaatatcatcaacgattttattgacatcatgatggaattcatgattgccaaggatatagtctacgccatctggaatttgttttgcaaatacctttaagcgatcacagacttcaggtagccattgtatcttgtcgataaggtcaccggtgatgacaacgcggtttgggtgttctaatagtgctaatcgcaagatttcgtcaaagtcatctaggtcaatgcttggcccaatatggatatcactgagttgtacaatcttgtaatctgcaagtcctggcggtaggtttgtataaccaaagctttcatgggtcacaacgatttctcgttgtccttcataggcagcatagccagcgccacccatggcagccaaaggtacaagggtacctacggttctaaagaaagcacggcgcccagtccgttcttcgacaggaaccttatgggagatgcggtttaccagtacatagatcaaggccaatatgatgaaaactggtatacacaagaatatggcgaatactacgccatagctttctgttctaaacaagttaagccattcataccaaggcgtgccgtatagatcaacttggtataagaaatagtatcgcaccgcacagaaccaaccagcaactaccaaaatataggccagccacgcaggccatagttttttcggtttccataaatagaggtacaatccccaaaagcttagaaaagctatggctagcaccacgagaaacacaatatttataattaattgcatatacgctcctaactgtatatcaagtaatggctaatacattgagataaaatcagtgttcgtctcataaatttattctacaataggacataattctgtcaatttaccatgaggtcctgcccaagcataatcggcaaattcatcccgtttgatgagcatccaatccttaggtaattgcttttgtatcgattctattgatgtatggtctccagtatacagcaaatctcctcgaaaggccttcataaaccatttacgatgagaaaatacatgagttaattctttcacaataacaggttgcaaggatagactaaagcccaatgcccctacaatctcagttaaaccaaattctgccgcatcataggaatccgcattttctacagatggaaattcccacatggaacgcaagaggcctcgattagggcgtttatgtagtaaataatagtcgccataactaaggatgcctacaaaaacaggcacatctacaacctttgttttcttgatacgcacaggcaattgatcggttacattatgttgatacgcataacacgtattaacaatgggacactcaccgcaacgtggcgtcttagggatacatacggctgaaccaaaatccatcaaggcttggttaaaatcgcctggtctatcatgaggcaacgtatcctctacaatagcagttatggccttcttgccctttgtgctcaaaatatcatcgaatatgccgtacaaacgagcatagatacgcaatacattgccatcaacggccacctctggctcgccataggccatggatagcacagcgccagccgtataggaaccaacgcccttcaaggattccatgtccttacgattgtgaggcaccacaccgccgtaattgttcaccacatcttgtacgccaaggcgtaaattacgagcacggctataatagccaaggccttgccaagcgtggaccacttcatcttctgtagcctttgccaaatcctctagcgttggaaacaaacgcatccaattgtcataatagggcttcatcgcctcaatgcgggtctgctggctcatcacctcagatacccacaccttataggggtcaccgcaatcacgccacggcaaatcccgtttattcacatcataccacgccaataactgtggtacccacttggggttatttatctctttcatagttcctcaatataggtatatgtgaaagcacatcctatactttcactatacgctactcattaatatataaatcaatacgagccaacaattcactttccatgacattatcgacctctgttaaacgcatatcctcgacatgactgttatctgggccaaaacggataggccctttcaataacttgccctctaatagcatgggaagccacgtacgatccccctcccacatatgctcataagggacatcggcgaatgtaaaccaatgcggttccatctcgtctgattcaatgggctgtacatcggtaacacgcacaaaatatacatagcccacatgagttagactttcatcatagggaaactgaaagtcaaaaagggctacgcattctagatcagacgcatcaacgcgtatgcccgattcctcatacagttcgcgcacggcacattggcgaaagctttcaccagcattgattttaccgccaaatccattatatttatcagcgccaaagccacgttttttgcggcccagcaaaattctattttgttcatctatgggaaataccaaggttgtaggtttcataagacctcctataatttggtaaagattattaatatattataccattatttcatgtgtaatactgtcatttatggtatgattaaaggtatgagatgaaaggaggcgcaccatgaacgaaccacttatatttgacattgcactagggcgtacaaagcctgtaaatatgcgtgacgcaagtgtgcgctgtccattctgcgaccggtcaaagttaacagatattctggctcaagatggtcatatcatatggctcatgaataaatatcctgttttgcaggacacgtggcctacggtcatcgttgaaacagaaggtgaccaaggcgaactatccaccctttccgttgatgatgcaacacggatcattcaattcggtctagataaatggcatgaaacgattgccacaaaggaatataaatccgttctattctttaaaaaccacggtcccatgtcgggcggttccatacgccatccgcacagccaaattataggcctacacaactatgattatcacgaggatattacggtcaaaaacatgaatggctggctgttacacgaagatcaggatatccgcattaccttatccaaacaccctatcattggattctttgaatacaatttgcggtataaacctgatgcaccggtccgttccatcgccatgcgcttacaacagaccatacgctatgtactagatagcttggcaaaattttcccaatcctataactatttcttctatcaactagaggatggttacgaatatatcaaggtgattcctcgctatattacaacgccgctctacgtgggctataaaattccacaaacgtgcaatgaccaacgagctgcgaagattttacacaatattacaccctattttgaattaaaataagagttctctgctacgagttctgtaggttagaggactctagtaaggatatatatgaacatttacgccattggagaccttcatctatcgggcaatccacctacgaagccgatgaacatattcggtccccactgggacaatcattggcaacgtataaaagaacattggctgtccaccgtcaccgatgaggacattatctttctcgtaggcgacatgagctgggccttgcgcctcgatgaagcactctacgacctcaaggaaatcgctagccttccgggtcaaaaatttatgattcgtggcaaccacgattattggtggtcctctgccaacaagatgaaaaatgctatgggcgacgctattacctttttacaaggtcacggtacggcccgcatcgtcaacctcacaactcaggttaataccttaactggtgaaagccagtccactgaacatcaatgcatcttagcctttggtggcacccgcggatatatttgtcctgatgatgctagctttgaaccagatacagatcaatctatctatgatagagaaattatgcgtaccgaagcggcattacaagaaatggagcacgctatccaagcgtcgcaaaaggaacatattgaaacagagaatacaggtaatccactacctgtaacgcgaattctattactgcactaccctccatttaatgaaaataacgccccatcaggttttacagacctcatggagcgctaccaagtcgatatatgcatattcggccatttacatgaccaaaattcattcaaacgcagtccatctacatatggaaatactaaattagaactcgtttctgcagactatgcagaatttaaaatacaaaaaatattgtaattgaatccctatgagcgcataactgacatactattcaactgtgcatcatacatttataaaggagaattatgagtcgcattcataaagagcatttacaagcaggctatatctttggcgatacaattaatcaagaatacatctacttgccatccggcgaggtaggcacagaccatccattggcagtcctcgaaacacctacaaaacgagaggaccttacattggatgaagcggttcatatgattgatacattaacattaaaacggtgtagtcatcctacattaggtaaaaaatcattttaaatcataaccacccgtagaacgggtggtttgctctgaccctataagggtctttctctagtggtagccctctaaagagggctttgaataatctgacaatcactctattaccactggctgacccctactcgggggcttttattttgcctattttaccggctcatccgtaaacgggtcagtatattctttaaagtttaatgtatcttgtgctatatcttcttgtagttgattgcgaatacactcttttatcgctccttcgtatcttcccactgtatccacataatatcctctacaccagaaatgtctatttccatacttatattttaaattcgcgtgtttatcgaatatcatgaggctacttttactttttaaatatcccataaaacttgatacacttaaatgtggtggaatagttactagcatatgaatatgatccggacagcattctgcctctataatctctacattttttctattacataaatctcttaaaattttacctacatcagcttttatccgaccataaattatttgtcttctatactttggtacaaaaacaatatgatatttacatctccatttactatgtgataagctttttacgtcattcattgacattgaacctcctatgttgaaatgttgtggttgccagaccaacttcattttatcactaggaggttctttccttttctctaaaaattttttaccgacccccggtttaactggggggttagtcatgcctattcggcgtacaatataaaataatgttggaagtgacactgtagtagtgtcaccccaacatttattatagaaccactaatcaactatcttctatctaaatatacaaccttcatattaaacaagaatataaatattatttaagcaaaatagtaagcattaatccactatacctattaacctattttataatagttcaacacaataatgagatatgctaaagtttaacaacctattcttatttactaactacttttcagtactcaaaactactattaccctattatcagaagaatgtccctcaattttaatagtaacatcataatttaaatcatagcctattatatgtctatttttatattcacgccacttaattctgtcattcgaaagtaaagctttaattttttcaaattcaatatgctcatatataattttaaaattataaacctgactatttctacctgtagcataatgatcttcatttaccttataagaagatatacttacaagcttttgctcatatgattcaagcttttgaatttggttaggtctattaaaaaaagcagctactgtcataaaaaaatgataatcacacatataacagtaaaacccaaaataagcttaaacgataaaggcaataaattaaaataagacattattttttcataattaatcctctatttcaaattgagttctaatagctcgaatacgattctctaaactttccatatcatttgtttctctaatttcagcttcaggttctgttggaggaggtgaatatacaccatcaggttgatctggtgtataagttgataaatctacagaagtatcattcaccacatattctgatggaacttcactttccaacttctctgtataagaaaatgatattgttgcctctggcgaaacattcatagttttagactcagttatattggtagggcccagactataactttcaccaccaccagtattcattgatattgaaatggccccacctgtaaacccttgctcaccatataaaactctagtgtcactggttgttgattgaactgggaatgcacttggccctatagaaacttggtctgtaacatatgaagaaccttccgaatctatcccataacctcttgaaaatccaattccaacaacatcagtaatacctgctccaatcccctttggactcagaatacaaatgatctttacgtatatattttttcttttctcttagtttattaatattatatctattactttgagctaagtcataatttaaatctgctaatgctaaatctttattatcttctgaaatcccatcaagatcaactctatcaatatgaaataaaccttcattccactttgtagcataagatgtagttgcagcaccactattacttgatttcccacctactacaccatgcgcaatggacttagcaactttaccatccttagttgttggttgccagttatgtagttgttcaaatgcatttttaaagaatagacgagctaactcttgacgttcttcaattttctttttatcgaaaatcttatctaattgatgtaatgtattctctgtattggtattaatcgtcttagtatcaatttctttaccatctactgttagtataccatcagaaatagcagattgagtagtcgagctagctttacctttagattctatgcctaagtttggaactagaccaatgctgttataaatcttatcatagccatcttctccagcataaatacctgcctgatgggtcacgcttttccatttactatcaatacgtcctacactcgcattgatactaccagttgtatccttgaaattaggtttagaagaaacggagaacactaagtacaataaaattaagtaatagtataataagacaaaaggactgtagcgaaatacagttttaccatatttcgctacagtccctttttaggtatattttttattttattcaggtacaaatactactattataaagataaaatctatctttaaatctattttatcctaagaagccaccatgccccatacagatacagtcttcttttgtaatttcatcatctgcaatgagccgtggcacgatttcatcaaaggctgttggtttgctaaatagaacaccgcctggtacgcctaaaattggtgtgccatcagcacagtatgcaatgcacaccatagagcctggcaagacagggagaccataggttacaacgcggtctgcgtagcgtttaatggcgcctggtgttaaatcatcaggatcgacactcataccacctgtacagaatatgatatctgcgcccgccgcttttaccttgtcgatggctgccacaatatcgtccgtgttatctgttacgatttcatgggcgatttttttcaccccaaattctgcgcaacgctcctcgataataggtgtaaacgcatctttaatgcgtccttcaaatacttctgaaccagttgtaacaatgcccattgttttgcgtacaaatggttttatgtttaagataggtccacctattttttgagcctctgttatttgttgttcttctagcaataaaggaatacaacgcataccagcgattttatcgcccgcttttacgggcgtattattcaatttcgtaacgatagttaattcaccgatgctattgatagcgtatagtttatctacatcgaccttgagtaggccatctacatcggcaatggcctcaattttgccttgtgccataggaccatcgtgcatatggtcaccctttgcgatagcatacaaggcacgagccacgtcttcttcgtggagaaacccttcatcttctggctccattacataaatatgttctttaccaagatcgagtaattttggcacatctgcttctgtaatcacatgtcctcggcggaagggtgtgtctttcacctcgccaatgacgatgcgtacaatatcgtgtaccaatgcatgtcctacggcatcttgtactcttatttctttcataatctaacctttcaatatatattctatttcatgtatatcaaacgtaatatatagcaatacatttactatatcatatgaacgatagctgctaatatgcatttacgcacatacgagtttagcaatccacataccgatggcacaaagggctaaaccgccgaggatttgcaccgccccatagaatagaacatctgtaacatcaccagatgttaagagctgtaaaagctcaaaggcaaatgtagaaaatgtagtaaaggcacccagtccaccaacgactaagaagaaccgaacccattgaggccagtcgggtctacaaagataggcccctaagatgatgccgataatcaagcacccgattaaattaaccgtaatggtgccaaatggataggggcctaaccgcgccattacccattcccctaccactgttcgcgctagtgcaccaagagccccgccgcaggcgatagctatatatttttccataatagatctccataaaattaacgattcgtgtaattatcatatatacataataattatcacatattacgtattagtcaacaatgtatttgctaagtatactaaaagcacaaggtagggatcggaaaggaggtcttatgaaggatcctacacttacaatgccggcctaccgacggaatcattatcaagacccaaaatttcaacaacagtatatgtgcttgggtcacaaaatctctactctgcgaacgtcgatgggcatttcacaacgacaattggccgatgtcgtaggcattagtcgcagctatttgagtaaattagaatgtggatacggaatatcaggcgtatccatcgaggtagtatttaaaattgcttattgcctcaatgtttctaccagtcaattgctacatcttcgtacgcaagactataaatcttgtaatagacatctttcaaaacattatgaaagagtcgaatttttccgactagcacaccagcgctttttggaactaaaaaaacgtctctaatcaatagacctcatatgaatagagacaaaattaattctttattacactctcttctattcaattaaaataacattatataacctttcaaaaattagattaacaagataaagtaattcctacttaacacgtacaacatatataaaagataacccccttacaatatcttatatatgactttgcaaaacaaaggaccctatctagggtcctttttgctatgtctatgtagtttttatacttcgttcaagttcttgtcttgtaattccgcattagcccgtttaaagataaatgcattattgatatgctcgcgcatcgcattttctgcggccacttcgtcgtgacgttcaatggcatctacgatgtgatcatgttcatcgtcacaatcgtgtgtgcgcactgcattgaaggagctcaagtacatatcgcgatttacgcgttcacggaaatcggctaagtaatcaacaacgcgatcattgccagagaattgagcaatcatgctgtggaatcggctattaacctctacgcgtgccgtagcgtcctcaatggcatgcatttccttgcataattccttaagctctgccacttgttctggcgtagcgtgacgagcacacaaacgcgcccccaaaccttccataacctcgcggcattgatatagcgccacgatttcttctggtgtatccgccttaacagtaacacccttccatggcacgataacaacaaggttatcttttgctaattttctgaaagcttcgcgaactggcgttgcactgactttgagctgttctgcgatcttaacttcatttagtttttcttgcggtaatagctcccctgttaaaatagcctgtttcaaggtcacataaacttgttcacttaaaggcaatcgttcaattgaatctacagcggaaaaatgatacacatcttttggttcttttgtacccttcacgtcttttgtcatatttctagccttaggtcccctctaatgtttacacgctttcatactttcaatgaacgcctaaaatgagtataatagaatgtaagcatttttatatacgaacacatgtatatataataattgtataccctataattataagtcccgtacatatgactgtcaatttcaagatagtcacagttaaaaagtgaggaagttacccctatgagtcgttgtttggttatcattaaccctgtatctggcggcggtgcagcacgccgatacgcccttgatttacagtggaaattgagcactctttttgacacaattgaagttaaatttaccaccggtgccgacgatgcaacccgttttgcaaaggccgcttgtgaagatggctttgacgccgttttctgcatgggcggcgatggtaccgttaatgaaacggtaaatggcatcgcccaaggtggtttcaaggcaacctttggctttattccggtgggaaccgtcaacgatatgtcccgtgctctcggcattccacaacgaccattagaggcaattcgccgtctcgatatcaaccaagttcgctgcatcgatattggtcgctgcaatgataaatacttctgcaataatattgcagctggtgtcattccaaaggtcatcgaagaggtaacgccaaaggaaaagcgcatcttaggtccattggcctacttcttgcgcgccggtcaagccctctttactacaaaggactatacataccgcattcaaacggaagatgatgatttcatttgcaaatcaccacttgtattagccctactcaccaacgtagtgtctagttttgaacgctttatgccagaggcttccgtagacgatgggtatatgcgcctcgttatttttaaggaatactttatcctcgacatcttcaaggttctacctcttatcctaagtggcgccatctataactctagcaatactactacattgacggtcaaaaaagctcatatcgaactattgagcaatatagataatttaccaaccaacatggatggtgacgcaggtccttatatgcctgtagacctcgaggtattaccacgggtcctcaaggtatttgcaccgacaaaacatcaaaagaaaaaaccgcttctctaagcgatacgaaccccctttgctggcacaccagtaaagggggttcgtattatgctaagtcgattgtcttatataggcttacaatagaaccgcttcatgtaagcggaagctataaatataacttgctttcacaggcatatttgtcaatcgttctagggcctctttgtagaggtccatttgtattttatagcgacgaatgagctcatctccactcttaacgcgatccgtcttatagtccacgaggacccattgatcatcttctacaaagaccgtatcgataatcccttgtaagaatagacgctcaccattctctacatcaggatatacccgattaccgtcaaaaagcatgctaaacggcaattctcgttccactcgttttgatgcaatgagacgctggccaagatcagagttaaagaatccatataagctacgatcacttaatagactgcgttcctcatcactaaatttaccttctgcttgcaatgaatcgagcatatctgtcatggatgtttgtgtatactttttaacaggtagccattgcatcgcttcatgcatcaatgtaccccattgcgcacccgttacgacctcatcagctactgcaatagccagtggtttacgaccaaatacggaatcggctagctccgttccactaatagtaggaatgcttgtatctaatatggcattctcaccagtcgtatcctcagttatatcacaggatattactggtttctgttgcatcgatacatctgtagccgatactgcctccgcatcacgttcggcaaatctccgtttcaattcactaacagaaatcttagccgtcgtcttggcggctacaagatttggataggtgaaagcaaagcgctgtacgatttcctctggcaatgctacatcatttaccttacctaatacgcgaaccgtattgatggtcgtttcatccacatccgccttgtaatctaaatctccataaagagaaccatcatgaatctctacctttacctgacattgacggtcgagcaagtcaaaatttgtttctccttcgagttcaatgatattgcgaagtggtgcacccccatctagatgacgggcgaaggcgatgagtagccaatgcaaataggaattaccagctttgattagatcggcacctaatgcttgggtctgcgtcaaggccgcatgttttatatgagcgccaacgcccttttcctttttgatttccttgttaatatatccggtcaagaatagtttatcccgtgctcgtgtcaatgcaacgtagaggatacgctgttcttcggctttcatagcatccgatttgatggatttacaatagagccacggcatggacggataggatacgcgaatgtctgggtagtagccctttaatccgataccgccatttttatcgactaataacggagaattaaagtccatggtattgaacttcttttgtacgccagacaggaatacaacagggaattcaaggcccttacttttgtggatggtcataaggcgcactacgtcatctgcttcggtaactacattggcaacggccatatcttgattgctatcgcgtaagctttcaacaaagcgaaggaacctaaagagccctcggaatccggaggattcaaatcccttagcccgttcatagagggccatcacattggcgcgacgcacgaggccattcggcatggcgcctacgtagttcacgtagtccaatgtttcgtaaacatcccacaacaaatcagctacaccatgacggcgagataatgtgcgccaacgctcgatatgagcaatgaattggagcaaacgttcatcttgagcctgttctgtatagagaggcataacagaccataaagatccgtccccggtaaggcgcaatgcaccgagttcattggcatcaagccctacaagtcctgaatgcaatacggcggccatcggcaaatcctgctcaggattgtcgatgatttgtaacaaggataagagcaattggatttcttgcgcttcaaaatagccatctcgttcattaacaacggctggaataccggcttgacgcatagctgctactgcccgtgtaccccacccagcaagggacctacgcaatacggcaaagtcgcgccattgaatttggtggaacgagccatccgcattttgcacctgtttcttcgaggcatgtaattccttgattttttggatgataaaatccagttctcgctcattgttctccggttcatcgcctgcggtttcggaatcaccatcggtttcatcagaacgattcgtatcgctcgtatccaagagatgtaattctacagcgccgcccacccaatcggatggagcctcttctacgatacggcccggtataagcgattctttttcgccataatcaagctccgctgcctcttgggtcataatttggtagaaaataaaattcgtagtagtcaaaatattttcgtgagaccggaaattcttcgccaaatcaatgcggcgctctacggcatcattcatgagcccatacgtattgtacttgttcataaataacgaactatccgccatacggaaactataaatggcttgcttcacatcgcctacataaaaacgattatccacgcgggaaatgaggttgataatagtttcttgtacaccattcgtatcttggtattcgtccaccatgatttctttgaacgtatcctgtaactcaagggccacttcggatggttgaggatcatcttctgtacctggttccacaaggagtgccaaacagagatgttccaaatcgctaaagtccatgatgccttgctcttttttagcctcatcataggctttgtgaaaggcgatagtcaattctacaaggttatgaatgagcggatattggtctttaaattgctgttgcagaacggattcatcaatatgaaatagaccgtttttcatgccctttaaactatccttgttttgagagcctagcgatttaaattcgtctgctaacgcaccatcgacttctcccttttctaaggctttgccaaggcttgtaaaacttgcttttgtaaaggtatctaagttacggcatacatcgaccatatcggaccaagtctgtgccccttttaattgggctaatgcggctaattgttcttggtacaccttgtcccatttcttaggtcctacaggactttcaagtaaaggttccatctgttcgatgcggtctgcaatgcggtcgatttctgtctgttggtcgtcccacatagcacggccccataaggtatctcgtaaatcctgctcttgagcggccttatatggttctacggcatggcgcatccacccgtcaggattcgattgagacatggcgaattcatagagactgagcaccttatcttgcaatcctgcatcagatttatcatcgctaaagaaatcagataggtcaaaaataccatacgtattatgttcataagcctctttcaaaaggttctctaacacctcttgttttaagagggccatttccgcttcgttgccgatgcgggccgtcggaggtatatcgagtttataaaaataagagcgaatcacccactgacagaaggagtgcaatgtcgaaatatgtgccgatggcaatagattaagctgtcgctctaggcgcgcttgtaacgctttatcatcggtggattccatggccttagctaaggcgacgccaatacgagcgctcatttcagcggcagcggccttcgtaaaggtaacgaccatcaattcttgtacggataaaggattctccatatctttcaaccgcgtaataatacgctctacaagaaccgccgttttaccagaaccagcagcagcggcgacgagcaaggtttgagcccctagattactatccttcggggacatgatggcagattcctgctccggtgtccatttaacgcccattatcgtcacctcctgtcatagaactatcggtattagaactttcacaaaaactatcgttagactctgccgaattcgatgaaccattgagggcatcgcgcattttttcaagggcattcgcctcatttaaagcactcaaataattgtattgattgcgctcattatcaaagcgacacaccgtcttgtaatcgcagtaggaacaaggaatggccttattcaactgataaggagcaatggggaattctcccttaccgatggcagaaccggtgtccgccataatcgattccgtatagcggcacataatatcaaagtcgccggaggatttaacaattttcatatccccagaatggatggttcccttcccggtaatacgaacgggcacataagggcccttgctcttataggtgagcaaatttttatccatcttttccaacatgtcgatatcatctgtaaaataccccttattattaagggccccatttgtatccgccaaggctttggcctcttcataggacacaggctcacccgctggcgttcgtggattttttacatatgtatacaccacagcggccggtgtcatcggttgatcatgatgtttcttataagccgattctaatgccaatagataagtcatcaattgcaattttaggccataatagatttcttgtgcattaaccgatgtactacccgatttatagtcgataaccatgccgtacgtatgaccatcacgattatattcatcaatacggtcaatttgccctaccaagcgtaaataacggtcatctccaagggataccttaatggagtcccatccattgggacgtccaaagtcctgttctaaatacatcgtatcaaaggaggacctgctagaccaatcaacaaggcgcgataccgttttctgtaatgttctcacaacgcgctcttcaatagccttatcataggctgtcttttcatcctcatcataacggttttcttctaatatatccgctgctacgcgagcacataattcttgttgcgccgtttcatccaaatcacgccattgcttatgctcggataatagttgcgttcctaaccgctccaaattggcatgtaaaaaggtaccaatttcaggagccccaaaggaacgaaccttacgaggctctaattttaagccatattgagcatagaatttaaacggacattgacgatatttttcaaggcgcgttaccgacccagacatatagccccgtttgaggaacagaccagttactaactccggcgcaataataggtacatcattattgtcgcgaataccacggctcacgtcctctaagcgtggtctgtaggccccatcatggcgagcccagttatagaggccccaccataatggtgatacaggtacaccgctaaacaaagcgccccaacgttcagataatagggatagactttgatatggacgccataagtattcatcttctgtgccgtcttgaatggtaaaaggaacctctataggggacgtacagaaaccgagggattgtaatcgtttaatgacgagggaactttcaagtccttccccttcatcattggaacctgcataggatatggttaaatgctgctcggcccgcgtcatcgctaaatagagaaggaaattttcattaaacgccttcggcaaggcgccttccgcaagaacgatgcccgcctcagccaatgcttcccgttctctatccttgatcaaaccttcatcgcccatgttttgtgggaacaccccttgattaaggcccatcacatagaccctaggccacgattggctgtacgcccgttctatggttgtaatcgctacatgatcgagggacggaggaatcatggagtaatgaacattgtcgagggcctcttctaagagggctatcatttcatctaacgtcaatgtttccgtatcggtgaggaccatcatttcatcgaggaatccaatgaccgcattgtacatttgctcgtgactggccttggattctaaatcgccatcacgttcagcctctaaggaccattcatagaggcgttgaggcacttgtaattcttcgagaactctgtagatatgtttacaccattccgcccctgtatgcgcatcgctagacgtagcaaaatcaaaccaaggtatcaaaatatccatgatagcctgtctcgatgcattcacgcgcgcatgtctcagtgcgtccggttgttcttcgtctgaaagccccgttacacggcgtatataggaccagttatctcgttcccactgtagatgatcaataccaaattcgagcacgtagttttctaattcatccacagcctcgcgagtaagaggtgtcaaatccgttttcaataaacgaaacatgatgtcacgactataactatgcttaacgataccaagcaaatccgtcatcaattctccaagcggatgattgttcataggtcgttgacggtctccaaaatgaggtattccatagcgggtaaataccttttccaacgtatcgccataggtttcggattcacgcagcataatacatatatcgcgatagcgcgcattagggctgctttcaatataggaaagaatatcacgagccacccaatccgcttcgcgttctcgattataggcgcttacaagcggtatatgttcagccgtagtattgtgcttaccgtgaaagaaattttcctctaaagattgcaacacaggtgtccctctatgccctgtaaaagactgaaaggacaatttcgttccatattccttatggagattttccaagatttcaacggagcgattaaaaatgccatgacgacctttattagccaatatacgtttagggtcaactggtaaatcgacggtgattaccgattctacagcaagatcaaagagcatatataacagctcaaagtgaaccggtgtaaaccagtggaatccatctacaaagacatgacagttttccatcaatggagactgtggcaatgcatgaacaaggtccatgatagggtccccatcaatttgcccatgaagctgcaattcctcttcataggccgacatgcatagtgccaattcctgtaactttttctgtaatacaccatttgatacgcgctgtgcaccagattctaattcatcaggtccaatgcgaaatgagcgaaactcggaaaataaaccttgcaataccgctgaaaactctggccgtttagcagcttgcgacaacaggcctaattcagccccttttcgtttcattacaaggcttagcaacatggttctacccaattgagatatactctgttgctgagcctttacattgcctatcgattgatatacctgataggccaatcggccaaagccaacgacgcggaccgtcgtaaagcctccttgaggcataaattccgcaagttcccgttccacgcgataggtggctggctctggaacgagcaaaataatagggtcacccgggcattcagtgataacctgccgaatgcgttcatatacggcacgggtcttaccggaaccagcgcgaccataatacatggtaatactcatactacctcccacaacaatgcttatatttagtaattctgcttatatttcatcatccctaaaaacaaatatatagcacggataatttatacgacatataaatatatatactattgtacaccatggaatattaaaattgtatttgacaaattctcatttttcccttattctgtttacaaaaattaaaaaaattaaatttgtttatattttatttacatattagcattcatcatgtataatgaaacctagatgaagtgttatttgtaaaaatgtgagattaggagtctttattatgaatacaaaacgaattgcaacggtatttgccgtattggcagcaacaacagtttctttttctgcatttgccgcatctatggatgcaaatgcacgcgcttatgaacgcgctgcagcagaacaagctcaatatgaatacacacctgtaaacagtgcacctgttgcacaagcaagctatgtagcaatgcctccgcgtcctaactattccccattgccagctgttccttatacagcaggtgatatgagccaacaaatgcctgtttccaaagaattaggcgatccaatcttcgtggctccacaaacaacagctgtaggcatgcaaatcatggatccaattccaagccctaatgcacctcaacaacaagctgtagatgctccagctacacttactttcagcaaaagcggtagcggttatgtatccacatacagaaataaccaattgaacgcatttgatgtattgttgaatggtcgttcttatacattcgatttaccagcttatacaaatggttaccaagtaaaaactgcaagttcttacaaccgtgctggtaacggcatcgccaatgtatttacaacaaatgttattacagaagccatcgtaaacaacacatccttacgcgttactgttaacatgacacaacctacatccgtagctgcatccaaattacgcgctatgcaacaatctggccaagtaacattgggcgaagtttccacattgttcgcttataatgaaagctatgatggcgtaaaacaagctgctaactacgatgtatacaataataatggtcgtttcatcgttgtaaaatccggcgcggtaacagtaccaaatggtgcacaacatccatatgcaacagctatgttcgccatcactgatgatacggtagcagctgtaacagtttctggtaacagtggtgaaacttatgaacttgtgaaaggcactgcttacgctatcgcagcttctgcacacgctgcagctgacaaaacatctaaacaaaaataattgacctccagtgtacgacgtatgtcgagcactacatataatgaaaagagcacatcctacgggaacgtgctcttttctactataatcgtgtaaatgtttccaatgccttataggccatcaagcgatagcctcgctcatttggatgaacctctccggcaaatacgatttgaccgatttgatcggcttcatgaagaacggtataaaaatcgatagtttgtaaaccatgttctaaggcatagtcttgtaaacgacggtttacgtctactaccacatgattaagtccatccatttcactatcgatttgcgtttcaaggcccataataacatgtcccttttcaccggctatggtagcggctttaatgagcttgttatatacgtagtcgctatcgcgattttgcaaaatatcatttgtaccgcacataatgcatatatatcgatcctcctcataggacttatcgatacaccaggattctaaataattgattaaaccttgcacagatagtccatcgatgccgtgattttccatatgatatgctggtagtgcggcactacatagctcaacccagccgagaccttctctcacatcatatccacgggtgatgctatctccaaaacatattatattcataaattcctccctgtacattaattcatctacattgtaaaatatatatgtataaagtacaatatgttactcattttcatgtattcttaagtacaccatggtacacttttttcacatggagaggagaattataatgaaatatttattagctctcgtgggaaccctattgtgtacctcgcaatcgggatttgccatatcacaatacgaaatagagcaaaagcccactcagtatcagctagcgtattctagtgataccgagcatatgtatgtcgaccttagctcaattcatacaaaacagactgctgctaattataaaacggtacaagctcgactattgagcttatacactaaaaataacgtaattgcagactatgatacaaacttcacattttacagccaacaacctaatgcaccgataacgatgactgcgtggaaaatatcgaaaccaacattctatgcggaaaatgggtatcctatcgatacattaccgcaacaacggttagcaaaggattacggtcaacatgtggcggcgccaaatagcccatcacaacgcattggggaatttatctataatacgtctaaagagatggaaaagattacctatacatatgataatccatatattccacctcaagtattccctcctgtagtcgatcaacagacacggaccgtattgtttggtctcatgcctcctacagatgctgttatttctacaccaatggatcgtgttataccagcacctccagcacctccaactcatatgcagccaagcttgcaaccaggtcatgtaggcggacctaactcagatagcttaggtgatcgtgggcgcttctcaccaaatttaaatgcacttcaaacgggtaaattccaaccatctaatcaaaatatggctcttccagatcgacaaggacctcctggccctcaaggttttagagataacaagaatcgtgataatcatcgcaacgatggtaatcgtgacaacggcggtcgtaatggcaatggtcgcggagatggtggccatggcggtggtcaaggtcctcattaattattatttacaaaaacatttagaaacacgaaaaccctcatcgttattgatgagggtttgttttatggctttcacaagggaaatttatttttttagttttacaaagaacaaggcaacggcaccgataactggtgcaatagcaagggtcatcaatgcagatttatagctaccagttgcagttagcatactacctaaaatcataggcgccaacataacgccgatttgattgaataagtttacaaagcctgccgtagtacctcgcaagtgaggttctgctgattgtacaacgagagcattcgtcaacgcactgtgcatgaatgcgccaataccaagaattggacctgtaataaagagcatatctgggtttgtggtgctcgcaaagagtattaaggccggaccaaataagaacataacgagtgctgttaaatggtttttcttaatcggcaaaatatcggataaaataccgatggttggctttgcaataagtgcagccaagccaaaagcggacataacatgacctgcatagatggcattaacacctagttgttttaccatgtacaagtttgaccattgagccaccgcccatgtagcaccggtagcgaaaaagccggcaaacgcaaggcaacgaatattgcgattttttaatacgtgaagcaagttttcttttatggatggcttttctcctacaggaaccgcttcgatatgagcctccgcttcacgttgagctaggatttcagcacttggcttacgaactgtaaaatagctaagtataaagataagaactggcaacatagcagttaagaggaatgcattttgccaaccataattcgttgctacataaggggcatataaatttacagtcgccaccccaagcgatgtacaagacatgaaaataccaacggctgcgccacgttgattaggaccaaagtaatccccaatagcactcaagcaagaggcctgtacaggaccagatacgatacctaataagaaacgcaacacccatccataggtataattatcaatggtactcatcaatgcggtgatgactgccatggcgagtaaactaaccaatatagtataacgataaccgattctatccgctaagataccacctggtaataccatgatggcatagcccatgtaaaaggcggataaataggtcgtccccatttgtggcgtaaaattcaatgcttcattgacaatcggcatcaatgacgcccaggatagacgcataacaaagctaatcaaaaacgttagccaaacgctgacgagaattaaaatctgagttcgcgagaaaccaattctactcatacgagctcctttctatagaaaaataacatatagagctatcatactataaatagaaagagtttttcaaacataatgagtgaatatctaatactttacaaaattaagtatccgatgtactataataattgactaaggaaatgaataactaacattgcttaacgcaaaagaaaaaagacggtactgcgaataccgtcttttttatatgtgctagttacttgctgaagtatctatctagccacttgcaaatgtagtgacaattaaggttatctattaataaagtgtacaaaaaagcagtactactagtcgcccaactcagaatggcaatagccaagcggccggtcaaatgactagtagtactgcttttgatactataagtataaaattgaatggcggagagggtgggattcgaacccacggccccttgcggagtcactggttttcaagaccagctccttaaaccactcggacacctctccatattggtatattatagcagatttatattgaagtgtgcaacaattgaatagaggtaacctcagatatctctcatgtagaactacttatatgagagacaaaaaagctggcctaaagccagctttcaggatatctattatagttattatcttagaaaagatcttttttccacatgccaatgatggccacgatggaacagaccacggagatgcccacaacctcgaagaaaccattttcatcgttttgaaacggcaatggcacgttggtcccccacaagctaaagataatggtcggtacggccaaggtaatcgtcaaggctgccaacattttcataaccatattaaggttgtttgaaatgatggatgtaaaggcgttcatcatgttcatcaagatattagaatacatttcaaccatttctatggcctgtttattctcgatgataacgtcctctaatagatcctcatcttcctcatacatcttgagaaggtgtttataggaactgtgaccacgcaagcgcaataaacgttccataacggtaccattggtacgcaaggcggacgtgaagtatgtcatggatttctgtaattccaacaattggaagaagtccttgttctttgtagtatgacgcaattggacttcaatatcgtcggtacgacggttgatttgttgcaagtaacgcaagaacatggtcgccgtgcgatacaaaatttggaacaagaaacgggtctttttatacgtatagaacgtagaaatctgattagaaataaacggatagagcacttcagattcttctaaacagatggtaataaagaaatctggcgtcaaaaagataccaagtggcaccgtatcgtacatatcattgccgcgaacaacaggaatgttgataacaacaaagatataattgtcctctaactccacgtgagaacgttcttccatatcgagagcggtctttaatacgtctgtaggaatttccgtcaggatattgataagggataactcatcggggtctgggttcaccaaatttacccatgaaccttttgtggcatctgataccgtgtaatcggctactaattcttcttctatgtgcttgtacaccgtgatcatgttatccctccttccgagcgaaaatactgtatctcatctttaaaattatatactatttaggtgtactattcaattctcttgtgaaagttttacatagaaaaactgctcctcattgcctaatacaatgtaggagcagtttattatctatcagtattattttctacttaagatgcggacagagtttaagatacaaaggatggatacgcctgtatcgccaaatacagcccaccacatggatgcatagcctaggatgccaagcaacatgataaggattttaacagcaatggcgaatacaacgttttgccaagccacgcgcaatgttgatttggacaaatcaagaatatgtgcaatagcggtcaaagatggacgcatgaacacaacgtcggccgcttcgatagccgcatcagcgccgctacccatcgcaccacctacgtcagcaccagcaagaactggcgcatcattgatgccatcgcctacgaacatggtaggaccatattcagagcgaatatcttgaacaacggataatttatcttgaggcaatagttgagcacgtactgcgcttacacccgtttctttggcgatatagttagcgcttgcttcagcatcaccagtaagcataacagttttaatatcttgacgattaagatcagcaatcgcttcagcagaatctggacgagcttcatcggcgatgataatacggccaaggtatgtattaccttcggctacaagaacttctgtaccgtattcagcaggttctgttggatagccttgtacatcatagcgttccataaggcgacggttaccaacaagtacttgttgaccatctgccatacctaccatgccttcgccagctaattcctgaacgaaatcggaaggttccactgtaaggccttgatcttttgcttcagaaacaatgcttgttgctattggatgtgtagatacagcttcgatagctgccgccatggataataattgaccagaacttacatgggagcctacagtttctacgttgtgaactttgaactcaccagatgtaatagtacctgttttatcaagagctactgctttcacattagccaatgcttcgataacacgaccacctttaagcaagatgccatgtttggatgcgttaccaataccggagaagaatgcaagtggcacgcttagcaccaatgcacatggacaagaaataacaaggaatgttaaggctgtataaatccatctatgccattcgccagtaatgagggatggaataatcgcaacagcaagggcaagggctactacgattggagtatatacacgagcaaagcgcgtaatgaatttatcgattttaggtttcgatgcagctgcattttcaacagcatcaagaattttagtaaccatggattcttctagaaccttatcgacgcgcatcgtaatacgtccagtttcattgatgcagccagacatcaattgtgtacctggttctgcgcgaacaggtactggttcgccggttacaggagccgtattgacgcgagtttcaccttcaagaatcgtaccgtctagaggaatcaaatcgccaggacgaacttcaatagtccagcccacctcaaccttttcaggggacataactacaatttcgccaccgccgcatgtatctatgacgcgcacctcttgaggacgcatatctacagcattcatgatttctgtacggctacgatctgttgctttttcttcaaagaattcaccgatacggtagaataaaataacaccaaccgcttcaggcaatgcatcgatagcgatggcacctaatgtagcgatggacatcaagaagttttcatcaaatatttcaccctttaagatattacgcgctgctgtacgcaatacaggaaatgcaaggagtacataagcaacgtagtaaatcggagtttcaatagattctggcaatccgatggatggaacaaaggaagtcaatgcatcatagatcataaataatagacctactacgataactgcaattgttacagagtcattgtcctgattgttttcacggccatcatccacagccgctttagatttacgttcgtaatcagctactgttacgccctcttcgatagcatcacagatatcttgaatgtcacgcttaagagcctcacggtcctcccaagacccagttaattttaattgatgggtagcaagtgtaaagttagctgtttctaccacatccattttacggatacgatcttcgattttcgctccacagttcggacagtttaaattctttagaagtaatgtttcttccatgatatctcctttatctatatttgaaagcacagaaagctttcatcctatatgaattaaagcaacatatgaatgttcgttcatatgttattttaatagaatctatactatatgtcaagaaaaattatcaaaattaataagatgtaaaacagcccatacgtatcacctatacgcatgggctaattctatattcttacattatagtatttactattttcattcataaagattgatttcttttatatctttaaaggtaatgacaatcccctctatagacatagtatgagccgtcttgtttatcagctctatagcacccactagttccgtataacaatgaccgttgtaatataggactcgcacaaaattcccgtctgtcaatgattggattgtacgatttagttcctctagttggtcctcagataactctacacgaacctccttaggccgtgctacggctgccagcaatgtttcaaatccctttaacgccgcaaaaggcataaattgtttagcccgttgcaagcgcgacatccgatgtttcatgaatgtataccttccctcacgcaatacatcaattcctattgtaaaatctactctccattatgaccgcctaccaatgtatttctaaactgcatggtcccttcttcttgcaagctagatgcacgaaggatagcatttttaccaaaacgtcctttaatattcagcatggttttctgtatatgttcctcttgctctgctatatccgttaatgcattactaaacaggtccatttcagtcggtacagcggccttattaactaaatcttcaaagctaacggcaatgcgtcgtatcaactcatgaggccgtttatttttatcaaacaaggctagtacagctggacataactcttgaaatgagtccgtataatgcgctaaggtcctagatccaccagtggactttagatcctctgccgcatagccaatatgaacatgaatacattttgtaaccgccttaatctgtagcagttcaaggactaaggactctaccatttcacgcatgggcaatcgcgcctcatcagccgtataattgcgcaatagaatttggctttgtgaaagggaatgtttagacggtctataggcgtgaatatcggcaatggtacagctttcacggccccacgcatgatcgattaacagctccgcgttcacaccaaattccttatacaatttatgttccggtacttgggtgatgccatacaaatcaaaggcgccaaatttacgcaaacgattggcgataccgctgccgatttgccaaatatctgtaatgggctgatgatgccaaatttgctctttaaaaaggctttcatcaagatacccgataaaatccggcgcatgcttcgccagtatatcaagggcaattttagcgaggaataagttagtcccaatgccaacagtagcgtaaatatgagtagcctcgagtaccgcatcaagcaggagttgagccaactgacgagacgttttcttgtacaaattcgtatatggcgtgatgtctataaaatattcatcaatagaatacacatgaatatcctcaggggatatgtaatttagtagcgtcccataaatctgcgccgacgcctgcatataccgtttcatatgaggctttaccgtgatgtattcaatatgtgaaggaatttgaaataagcgagaccgatttttaacgcctagctttttaagcgctggagagatggccaatgtaattgcccccttgccacgcgaattgtcggccaccactaacggtgttgtaaagggatccacacccaaatcggcacattctacagatgcgtaaaagctctttaaatcaatacacatatacatccgatctgtatcagctgaacccataccaacacctccttaaaacgctaatgtatcgactttcacaaaaattagtatttccataatttctatcattagtataacaaaaatacgcaatattttcaaacgtatgtttgctattatatagataattttaactataaaaaaggtatctatcattagacatatttctaataatagatacctttgtgctttgaatttttttgattctaagtatgtaccctgacgacagattacatttattgttcagggccaacccgatcttcgtctaccgtatctaagaatcgtgttaactcgccaataaatagaagttttacactccccactgcaccattacggtgtttacggataagaacctctgccttatcacccatttcagagttttcatcatagtatttatcgcgatacaagaagataacgatatccgcatcttgttcaagggaaccagattcacgaaggtcagataataccggacgcttgtctgggcggctttcaacactacgagacaactgagacaaagcaataacaggcacattaaattcacgagcaatcagttttaggttacgagagatttcagatacctcttgttgtcgattttcactgcccttaccggagctacggccttgcataagctgaatataatcgacgataacaagatcaagaccatgttctaccttgaggcggcgcaacttagcgcgcatatcctgcaccgtaagtcctggcgtatcatcgataaacaggctggcttgactcatctcatccgccgcggccatcaccttcccccaatcattagggtccatgtcagccttgcgcaacttgtctgattcaataccggccacggaggacaaaatacgtcctaccaactgttccttggacatttctagagagaagaatgctacggtccgcttaatccccatcgctatattttgagcaatgttcaaggtgaaagcagtcttacccatagcaggacgagccgctacgagaataaggtccgaccgttgtaacccatttaacttgaaatccaaatctctaaatccagttggtacacctgtaatagaacccttatgttgttgcagtttactaagtctatcaatattcgtaagaactacatcaccaatgggagaaaatgtcgattctgattgtgtttgaccgcctacatcaagaacgagttgttccgccttattcataatgacggatggctcatcctcgccagcataagtcataccgacaatcttattacctgcatctatgagacggcgcatttgcgctttttctacaataatgcgtgcatgttcttcaatattatagcctgtcgcttcattcgcaagagatgtaatataagcaatgccacctacggtatccaattttttacgtcgttctagttcttcacttaacgtaatgaaatctaccgtcttgttgctttttacaagatttaaaatagcatcataaatgatccgatgcgtatcacgataaaaatcatcacgatctacgatacttgttaccagatcaacggcttcgccagatgatgaaccatctgttaacaatgcccctaatacggccttttccgcgtcctcattatgcggtggtatgcgtacgtccatgttcttctccccttaactagaatatgagtatcttccctatgaaagcgtgcatcacgcctcttctatgcacaaaaagaatcaccacactctgtgagcatggtgattcgaagattattcagcgactacgttaaccttgatagtgctcgtaatttctggatgtacacgaaccactacatcatgaacacctaatgttttcaacggttctttaatttcgattttctttttgtcgatatctaccttgtattgagctttcgctgcatcggaaatatctttagcagtcacagaaccgaatacgcggccttcttcacccatgcgaaccttaacagtaacttcaaccttagtcaattgagctgctaagattttagcttcatcattggcaacagctttattgtgagcgatggattcttgcttttgtttcgcattatttacgttagttgctgtaccttcaagaccaaggccttttttaatcaatacattacgaccatatgcatcgctaacttcaacgatttcgccttttttaccaactttttttacatcttctaacaatactactttcattgttattcctcctctttttcagcggaatgaagggcttctagcgctttatctagaatagccgccttcgcttcctctatcgtcataccttgtagttgggcaccagccactgttctgtgaccgccaccacccaaggcttccattacaacttgtacatttaccttgcctttggatcgagcgctgacgccgataccgccatcattaagtgagtaaagtacaaaggctgcttcaatatcttcattgctgatgagcatatccgcactttgtgcggccaatgccatcatatccttcatacctgctggtgccacagaaatagcaataccttcggtacgattggcttcaaataccattttagcacgcaattggatagaatcgaaggtttcaataaataattcttttacccgttcaatatccgcccctgcacgacgtaagaacgctgccgcttcgaaggtacgtgccccagtttgttgattaaagtttttcgtatctaatacgatgcccgcatagatacctgtggcttccgcttttgaaattttcacaggaactcctgcatattgtacaagttctgttacgagctcactcgtagatgatgcagctggttccaaatacgtaagcaatggattttcaataaaatctgctgctcgacgatgatgatcgatgacaatgcgtcgctcagatacttcaagagcctctggcgctgctaccatcggtgttctatgcgtgtcacaaacgatggccaatgtattcgcatcagcccacaattttgcttctgcaggcgttatgatatgagttttccaaaattcgtcttccacaagaacatgtaccattttatcgatagcatttgtttcttttgaaagtactaatcgcacctctttaccaagagtacgtgcaattgatacgacgccaatagcaccgcctaatgcatcataatcctcacgttgatgacccataacaaggattttgtcagaatcattcatcaattcatgaatagcttgactaaccacacgagcacgaacgcgcgtatttttttcaacacctgctgtattgcctccgaagaagcgggtgctttcaccatccataatgcaaacctgatcaccaccgcgccctaaggcaatatcgagggctgcgcgagcacgttcggacacatccttaacagagcctgcattttcgccaatcccgatactaatcgtagcaggcacttgacgaggagaaggcaatttacggatacgttcaagcacactaaagccgttgttttccatgtcttgcaaagcgccccgagaaatggcaaatgtgtacatatcatcttggaagttccgaatgaaaccttcgtgtttatcgatttcatcaacgacgatattgttgatttccgcccatagatttgtatattctctatcgctgaggcccttcgtcaattcttcgatattatcgatttgaatcatgccccatacaggctgttcttcttgcgccttaatacgttccttttcaatggctgtaatatccttaaaatacaaagccataactgcatgttccgttaattcatcattaggatccgcatcaggtcttgtatcgcgagggtcaatgaacttgtacaccacttggaaatagcgatctccgtattgctctttcaagaaccctgatttgccccaaatcttatcaattctaaatccaggaatcaaagcggacattttttgcaatttattccagtccaccggaacccaatcggcaaacacactattattccataccaatgtaccttgcttattgacaagtacaatagcggtcggtaagttttgtaatgcaaagttagccgcctgcgacacattcttcatcatagcaccaaattgttcacgtgctaagcgacgacgattgtggatggtattgtaattaatcaagtatacagcaaccaccacgatgactgacaatatggctaatagccaatttaaataagcgatgattaagattaatagaacgatgacaccaataaaggtccattccattgcttcccatcttcgttgaaaggatttcatagtaacctcctttctattaataacctcgttgattgaaacgagatcgtaaatctaaaaacatatccataacaccaaacgttactagagatattggcatcatgacatataaaagagctataataacaaattttaatacccttgatacaccataaccttctaaaacgccaagcaaagaagcgataccgttaaggccacaagcaaaggcgccaaataaagcaatgttcataccaacagttgtaagcagctcattattgataccaacaaaggatgagccataaataataataagacctacagccaatacaccagccgtccaaacaggtatttgccaggttgaaatagcaggcaatggttgtacaggattattagtacgttttgcaatgtatgctgtaaaccgtgccaagatataagacgtaacagcaaacgcacaaaacgcataagtgataagcatccttttaatctgtactaagctcgcttgtatttgttgtatataaagctctgtctgttctggtggcagcgattgttgtttcacggtgtctataaatgcattttgtacttcatcaccaatattttgaatagatgtctgtaaatcaacagacataatagacattgatgctaagagcgtaataatagtagtcaccgctaatgctagcgtaggcaccaagattaattttaaaggggaccaacgtttacgaaaaccgagtccaataaaaatgcttggtactgcatacatcaagattgttcctacagctgtcaatggtcccaataaaatggaaacaatgacaaaggctactacagccgcagagcagctataacgaacgccccacctgatccctactgtagcaatcgccgcaggagctacgatagtagctaacagggataaaacaggaagactagcgcctataacggttaatacaactacgatggccgctaaaaacgccgtttccaccatagctcttgtatttgtttgtttcataatactccattcaacactaaaaggatactagttatcttttaattatagcagtttaataaagtaacttcaaataccctatatagtagataactacagcaactacgctacttatggtgtctcaacataataaagatatccccctcaagactgttcgccatgtaatcacggcattctgcttgagagggatatgttatttagtgtacgtcttggatgattggtaaaatcataggtctacgacgtgttttgtcatagaagaatttacccaatgcatcgcgaacgttttgtttaattgtagtccagtccttgatacgttgtgcttcacaatcatctaatacttgatgaacgcgacgttctgcttcaagcataagttcttccgcatcacgtacatatacgaagccacgagatacgagatctgggcctgcaatgatggtaccggaagcagtatccatggccataacaacgataaccatgccttcttgtgccaattgttgacgatcgcgaataacgatattaccaacatcgccaacaccaaggccatcaacgaagatagcgcccgcttgtacacggccacctttacggccaccgtctttatcaaattcaaaaatttgaccattatcgccgatgaggaccttcttagggtctacgcccatagccacaccaagttcaccatgacgacgtaacatacggtactcaccatgaaccgggatgaagtattctggacgcacaaggttgagcattgttttaagctcttcttggctcgcatgaccagatacgtggatgccacgatctttgccatatacaacatgacaacctagacgaagtaagttatcgatagttctaccaacagcaccttcattgcctggaattggtgtagcagaaataataacagtatcatttggtgccaattctacagtgcggtggttgcttgtagccatacgggataagcccgccatcggttcaccttgagagccagttgttaaaatcatgatttggtcatctgtatagttgtgcattacatctacgtcgataatcgtgtttggtggaatattcaagtaaccacgttcttgtgcgatttctgtaacatttaccatgctgcgacccataacgacaaccttacggttgaacataaccgccgcatcgattgcttgttggatacgagatacgttagatgcgaatgtagccaatacaacgcggccttttgcagcacctacagcttgtttaatagcaggtccaacggagctttcagaaccagtaaaaccaggtttttctacattagtagaatcagacatcaatgctagtacgcccttgttgccaagttctgcgaatttatgaatatccatcaatttgccatcaactggtgtttggtcgattttaaagtcccctgtatggagtacagtaccgataggtgtatcgaagtacaccgcaacggaatcaggaatggaatgattagtttggataaaaccaaccttcacttgaccgatttgcacttcatcgcctgctgcaatcgtgcgaaggcattttggagatactttatgttctttaaacttaccttcaattaagccacaaacaagatttgtagcatatacagggcagttaatttccttcataaggtacgctaaggaaccgatatggtcctcgtgaccatgggtaataacgactgctttcacgcggtccttattctcaatgatatagctcatatcaggaataacgatatctacgccaagcatatcttcactagggaacgcaagacctgcatcaagaacgatgatttcatcctcgtattgaaaaatggtcatatttttaccgatttcaccaaggccaccaagagggataatttgaaatttacccttattggagcccgctggttgacgaccaattaaatcggattgaacctcttggttgcgagtcatcggacggttgttagtgcgcgtacgacggttattagtattttcattacgattattatcattcgtattacgtgtacgcgtattacgtgtatttcttgtattacgagtattctcgccatttcgttcagtacgatgtgtattttcaccgcttcgagttgtacggttttgacgaggttggcgaggtttacgttctgtaccttgttgttcgccttgctctgctggacgttgacgacgtgtattcgttcttgtatgtgtcgtacgtcgttgacggccttcgccattttgactagcttcgcctgtatgacggcgttcaccagtacgacgaccttctgtattgcggtgttctcccacagatcgacgtgtgttggtacgacggcgcgttggtttttgctcaccttgagcagacggagccgtctctactgcagtcacttgtgcagtatgttgattatctgttgtattcacagttcctcctaaaattttattcattaatttgtttaacatatattttcacctatcattaaaatttgatctttacagaggaacggacaaacgaaaaaggcgctatccagcagcgtctttcaaatgggcgcaaaaatagcgcaactcaattgttaccgttcaagtccttttgtccattcgcctcgtgcaaatgagtatagtgtaccattaaacgcgtcagccgcgacgttacgttctcttcgttaccgtttaatgttcattataatccgatcgttctgatgaaagcctcgctttcatacgttattattattgtaacataaaaatagcgttaacaaaagaggacccttatgttaacgctattccattaatcctgtacgaatttgagctgataatcgcacaaaatctaaccgtgtttatacatcatatttagttatcatcatcaggcaaatgtttgtaaaagccttcaatatgccacgcaccattttcttcaataagagaaatatatcgcttcatcggtttagcctctaccatgccttcgccaacctttgtagtttgtaagtctgcttcaaatacaatacgttttaaactacctgaacgactcagccgtgccacatccaaggtaaccatatccacttttgtaccttgctgcatagctatgagccatttttgtttttctactggattggccctaactcggttcatcacatacgtgaaagccttatcatagtccttattatttaccgcatcaaaatagccttgtactgatgcacgagcggcctcttcactgccttcgccaacaatggcatttgtaaaccaccctgaagggaacacttcattttccggtcccatagttcgtaaagaaaatccaaatatacatactatacttacaagtacaacaattaaaactctcgttgttaacgaactactcgtaggggatactttcataattgaagctagccgtttatctatgacgatatgctgcaatgcaccaccatattgattgtcctgtggctgccccttttgacataacaaggcaagcaaaatcaagggtcctataaaggggatgaggaacagcaacaagctcatactgcctcgtcccgtatcatgaagtcggcgcacacataacgaccctaacggaagcaaggatactaaacatagtatagccgtcaagaacccacctaaaccgattaaatacggtccggtttgaaatatagcggttatagcatagaaaaaagcgagcaaaccaaccatacatacatgccacagcaaaagaaattgtaagaattccctccgtgaagcgcgaccatccgtatccatgaacttattcatcacatagagatatgtatccttatagctaagctgataatgggataaaggataaattacatcaccttcaggtgcaatgcgctccacctctgtagccaccgtatactgcccacatgtagggcaaaacatagccgcctcatcgcaataatgacggcaagcatcacaataacgtttcataagtatctctccaaaaactctcaaatgtttactattttaagcatgtatctacagcctccgcaaagccctgacgatatagattagcaccgccgtttgcagggtggcgcaacccaatagcagacaatccaaatgttcccattgtatctgcagatttttggcctacggcgagcacaagaggttctacgccgcctaattctatatgtaaatctaataagcgttttgtatactcccaacctagttgttgttctctatccgtaggtgtacggttagtcaatggattatcctccttatgaggatggaaggggaatatattccacaacaacgtatcatatggatctatccccttttcaacgatagcactccacaccacagtgtcagtaggttcgttaaaaccgtccttctgctgtgttccttttaataaagagctagtaggcgaactagtgcgttccaaccgaatcggcgttacatccttcgcacgaatggttttgtgcttatctaatagcattctttcacaagtaatagcaatgccactaaaacgtcccccttgatatcctactgcctcagccactacaaataccttagctcgacctaagcgcggtaataaataggctaccaaattatctcgacgcacttgagccgcatcaaaaccatctgtaacaatctctaaatcaggatttacctcaccccaaggattatggacgaaaccaccttgatactgagcgagccagtctacaaaatcgtgcaccttcaccacacgctccgcatcaaaggttgctatatattcatcaaaagacaaggtattctctaactcaaataaagacatacagcctccaatttaaaatttatatgttattaccgatatatatctactatacatgataattacacgaattgcataagaaataaaaaaaccacctaggtatgtcgtagtccctaggtggtttcttttgtgcactcagtggagcacttacaatctttagctacttatagtataccttattttaaaattttgtccattacaaaatccccaagtatatacaactaaatatagaactcgattttgtcttcttttgccaattggaattgttcaaagatatggtttcgaatattaacaaaggatgccgatgtgcggtcggttctatcgatgatatttacagggatgatagtttgtacacgacctggatttgccgctagtactacaacgcggtccgcaaggactacggcttcttcaatatcgtgggtaacaaatacaaccgtcttgccttcttcgcggcagatgcgagagatttcgtcttgtaagttgatacgtgttaatgcatcaagggcgcctaacggctcgtccatgaaaatgatatctggatctacggctagtgcacgagcgatagatacacgttgttgcatgcccccagataactctgcaggatagcgattacgagcgtgatcgaggcctaccattttaacgtatttgtcgatgatagcaggacgctcttctttaggtatttttttactttcaaggccaagctcaatattgctttccaccgtacgccacggcaacaagccatagttttggaataccgttacatatctgagttgaggcgctttcacctcttcaccgtcgatagtaatggaaccagatgtaacgagctcaaagcccgccatagcatttaatagcgtacttttaccggaaccagaagggcctaagaggcaaataaactcgcccttttcaatatctagattaatatcttcaagaatggtgagtggttccccatctttcataaattccttgtgtgcattgcgcaccgaaatgtaacccatgaggccacctcctatttctcaataccccaacgtttgtaaatccatttttcgatgagggatacgccccaatcgagtaaaagcccaacaaaaccgatggtcaaaatggctaccatcaagagatcgttacgcaagttatttctcatatcgataataaggaagccaagtcctgtttgggagcctaccatttcccctgttacaaggaagatccacgccgtaccgagagcgatgtgaaggcccgatgcaataccaggaaatacggcaggtaatacgattttaaataatagttctggctgtttaataccaaagttgcgcgctaccttgatgtacacagggtcgatattttgaatagcagacacggtggacaatagcacagggaagaatgctgcgataaagatgataacgatagccggtgcttgaccgataccgaagaagagaacgataaacggcaaccacgccacaggagaaattggtcgaatgacttgaacgattggattgatgtagttccaaattcccttgtaccaacccaagataaggccgaagaatacgccagctacgacggaaatgatgtaaccgatgaagaaccgtactaaactatctgcaatatccttaaagaggacaccgtctccaatgagttcaccaaagccgagcaacaccttatacggcgttggcaatagcgcttcattaaaaccaccgaggcaaacgattaactcccaaattagccaagctgcgataaatgcacctggcacatatgtatatttcttcatggtccccctcctatggtaacaatgattgatctacaaactctgaataggtcggcacttttttgattaaatcaatatgtgtcatgtgatgcataagcgcattataacggtcctctgtaagggctaaatctttaaacccaatcaccttgagggaacgttcaataactgggtcattaaacttcatgtactttaaggaaatctcttcttgtgcctttggatgctcatctaggtatttacctgcatcgagataggcttttgtgaaagcttttgccaagtcatgatgttcatcgacgaattgaccattaaacacaagagcacagcaaatattatcatgccagagatggtcaggatcttcgaagaccttcccagttcccatttcaatggctagagagccaaatggttcggctacactatacccagcaatttgacctaccgatagagcagaaggcatttctggagggctcatttctacgatttgtacatctttttcagaaagacccgcttgttcaagcatgcaatccacgagaattttttgggtagattgtttatgagggatagcaaaggatttgccttttaagtcttgaacggagttaatatccttatttacgatgataatattaccctcagtatgaccaagagcagcagcacgaacatcaatgccttgttcacgagcctttacaccaagttcaacgagcaccgatgcagcatctaccttgcctgtatttaatgcatccatcaactctggccaagatccatatttaacaagctctacatgtacaggaccatctgccgtttctaattcttttgtagcgaacaccggcaatgcatgggtaattggtaaataggctacgcgtacagtctttaattcttgagccgtctttggtttatggtgttcatgataaccataggctatgcagccaataaccaagagaactactccgatgattagataccatgtcttcttcataacttcccctctttctacctcacaacaaggggcgtttttgacacatgccacgtccgcacttttctaaaacctagatgaaataaggtttcagaacacctcgtcctaaaaaattatataacctactataccaatatgtttttaatatgtcaacaatacatataactataatgggttttatttctaaaaaaatataaatagtaattaggacataatatatacattaaatattcgattatatatgcaaaaaagcaccaaccgcattgtgatatgtaccccctttactggacactcagtaaagggggtattttcatgagatatagttatgaatttaaaaagaaggcaatagaattattctatcaaggtgaatggcccgaaacaccaaatggagtatcgcctcattcttttcatgaacaaataaggtattgggctaaacaagaggagttgcatggtccagatattaataagttttatggagtaaaaaagaattggtctacagaggataaatatgagttagtatgtcaagtattagctggggaatctttacgttccgtagctattgttgctggaattaatagtggtctactatatcaatgggttcataaatacaagactttgggatacaatggtcttatcaataagcctaaagggcgacgaccaaaggattctgacatgaaagtaacaaagaatatttcacctagacaactcaatgagagtgaatacgaggaactcattcgcttacgagctgaaaatgcttatattaaagctgaaaatgaagtcataaaaaaagagattgccttgagagaagaaaaggaagctgcgcgtctcaaggcgaaaaagcagcgattatcaaaacactccgaaagcaaggatatcaactaaaatatcttttaaaagctatgggaatggccaaatccacctattattttgagctctctaaagtggatcttgtagatgaaagaaatatacaacttaaagaggaaatccaaaagatttttacagagcataagggacgttatggtgtgcgtcgtgtatatcaagaacttcttaatcgaggttttatagtcaatcataaacgagtacaaagacttatgaaaatcatggggctcgcaggaaagagaccaaaagaaaaatatcactcttataaaggtcaagtaggcaaaatagccgataatattatcaatagagactttagtacaacagctccatttcaaaaatggactactgatgtatctcaatttaactttccatggggaaagtgttacttatcacctatcttagatatgaatacgaatgaggttatttcctatgacttggcattaaggcctaatttagaacagatttctcgtatgttagatagagctttcaaaaagtatcctaatctttcaggattgatttttcactctgatcaaggatggcagtaccaacataaatattttaggaacgcacttaaagaacatggaattattcagtctatgtctagaaaaggaaactgttatgataattctgtaatggagacatttttcggtaggttgaaaacggaaatatattatggctgtgaaatggaatatccatcattcaatgcttttgcgggggcaattgaagaatacatcaactattacaataataaaaggattcagaaaaaaacaaaatggatgccccctgtaaaatacagggaagcatccatgtgtttaggctagtaaataatatgtgtccaggaaaatgggtacatatcattgagcggttgatgctactttcacaaacacgattaacaatatattattcttcaatataagcttgtcgtttattcaaaatataaatctcagagctaccagcctcgctgtactcaccaacatatggtgcaatactagactgtttaaaatggttaatttctccttttggaacgatgaccataatttgcttaccttcagccaaacgcttgataaactcgtcctccgtcacttgttccataaggtatttcttatcccattcagcactacgatgttttaatttatccttatcatcccaacgactgctgtcccccttaatacgaaccacctcatgtccagtataatatacgagagatgtgctgtatccattgtaataatacacatcaccattatacttatctacaacagggataagattgatagaactacgttgtttaacaagaggtaccaaaccctcgagtactacaatcgatgaaatgagcatggttccaatcacgacaatgctcagcaaacgataccgttggcgagtccaccagaaccataacagccctaatatggatacgcctgccaaaacatagagcaatccataatacccccaaggtgcaaagaaagatgcccctacataagcgatccataacaatagtgtgggaccgactacaatccatgggacataacgaggccgccccggacgtagagctttcatagcccctaatgtaccaagaatactgaaaggtacaagactaataaatgtatatagaggatacttagtggccattaaggagtagaatagaacagtacccacgccccaacacatgcaatacacgtaccacttatggtgctgtttaaagcccgttatcatgccataaataacagcgcccgtccatggtaaagaagcgccgaggaaaatagcgatatagtaccaccacacattatcttccgggtgttcagactgagtcgcacgtgttacattgttaaggcctaagaatccatccaaaaaggcttgtccatgggcgctatacatataaacataccacggcatagcgacgacaagaaaggccaaaatccccttccagtcaaagaggcgtaataacatttgttttgaacgacaaagcgcaacataaacgagcaaaataaggccaggtaaaacaagtgccacgggcccctttgtcaaaacacctaatccggaaaatacatatgctacaatcatggccgtactagaattttcattcaagcctttgtacgcatacatcataaccatcaaggtcgtatataacagtaccatgtcggttataacaccatgagcaacagcccagaacataagagatgtaccaaggatagaggaacctactaggccagcgagccaacgtcgactaaaggtccgtaaagcttgaaacatggcagccactgacaaggcaccaaatatagcacttggcaaacgaactacccaatcagcaataccaaagattttaaaagctaatgcaatcagccaataaatcataatcggcttgtcataccaatatgtcccataaatctgtggcgataaccaattgccagacaacaccatttccttagcagttaacgcataattcgattctactggatcggttacaggtagtatattattagctaccataaagaataccagccaaacaacaaacaacacaggcgtcaaacgagacaatttcattgtgacctccttatgatttacggcgattcttatagtatttaaatccgagcactgcagccacaatagcaaagatgacaatcacaactagcaaaaattcatgattatactgaataagatctttccagttttccccaagtacttttcctaaatatacgagtaaaatcgtccaaggaatagtaccgagtacagtccaaacgataaagtgccacaatggatagcgcgccatgccagccgggaaggagataaatgtacgaacaccaggtaaaagacggccaaagaatatagctactccaccatatttattaaacatcttttcagcgagttcaaatttatgctcattaaagaatacatatttaccgtatttcaataacaacggacggccgccatattcccccatccaatatgacaaaatggatccaacgataccagccaatgtacctacgaccattgtcgtatgtaaatcaaatataccttgagaaattaaataccctgcaaatccaagcacaatttcactaggaatcggtatattcgcattctctagaaccatcgcaataaacatggctgcatagccatacgtttccataaacgaaataatatattccacttgttatacctcgtcataactcccctataccggatttatgatttttaatgctaactaatgctggtaaaaatatcaccatgtatacaatctattttaccataataaaatgaccctcaccatacgggagggccattcggggcatccttagcattctgtttttgcaagaatcaactagtcatacacagttattcagtttttagtgcttgtataaaatcaaatgattttacggctgcttctgtgtctacaaaatggaacggttccaacaggcgacagaatttaaatagatagtcacgcttgtgtaacacttctttcacatgaagaacagtatcccgtgcacagcgtgcagagctataaccattcatagctgcatataggtaggtatttggtaaatctccttcgcggatgaagctatgaataaaaatcagtaaatcccatccagcaggcgtgaattctggccagcgacgtgcattttcccaatcaaggagcatgacactatccgcatctggattataaacgatatctcgtaatgcaggacgtccatgggcaatcccatagtcgtgaagtgtaccaagagctttgccaaagacatagaaaatgtgaattgccatatcttctaacgaactatcttctggatgctcttgtggtaaatgaccataataggtcaaattcttaccataattcggagtcacaaaatagttttctcgaaagcctacaatttctggagctaatggcaattgtgtacgcacaaagttcatcatataaaactcatggtcaaaggatgcacgaggggatggtttgatccatgatgaccggttattacctacagcgcgttttacaaaatactcatcaccttgaaaggtgactgggaatacgcgccccaaatcttcgttattcaatttatggtctatatattctaataaggcttcgttcatgagacctcctaatgtcatcaatgcttacctatttattatataataaacaccatatatgtatcaaataaagaccccctagccaaggccagggggtctttacggtaattatgataataggtttaatttagattttataagccaactgaggcactctaaattaaaacgaattaacctacaaattttgtcactgctgcagtatcagttaagtgacgtttaggcatgcccatttcttcaggagtgatgccaagagcaagacctactaattgggacatgtgcaagattggcatatctttgccaccgccaacaacttcttttgcttctttttggaacatatcaagttgcatttggcaaagtgggcaaggagttactacgcaatctgcgccttctgtagctgcatctttgttgatggagccagtcatttgcattacggaatcatgtgcagggtatacagcatggaaaccgcagcaatcaagtttacgggagaagtcgattggtgtagcgccgatagcggagattaaatctgctaaggatgtaggcatttgataatcttcgaagcccatttcagtttgaggacgaagaatatggcaaccatagtattcagctacacgtaaacctgttaaaggtttaacaactttttctttcaatttatccaaaccgtaatcgcgaatcaatacccataagaaatgagtgatatcagttgtaccgcggtattgtttaccgatttgagctaattttttgttcacttcttctttttctttttcgttattgtctaattcgtttttagcttcacgaagcatcaaagtacaagtgttacatacagttaaaaggttcaaacctttttcttctgccaatgcaatgttacgtgcgtttgtagctaatgtaatttctggagcgatatcttgaacgtgggatgcgccgcagcaagtccaaccgtcaagttcttctagttcgatgccgagttttttagctactgcaacagttgccatgtaatcttctttggcagcgctttcaagaacgcaacctgggaaaaatgcgtatttcattatttgcttacctcctcagctgctttcataagtctgcgaacaccatcaataccattaactggtttttgaggtactacaagttcgaaaggattaattttgctgtgtttccacaaacgtaatgcatagaatgcttgtttagcggaatctacaacaccgtcagatttcaagctcatagaaacttctttcaagcgaccagttttgtaaaggtcttctttgaaagcaactgcatggcgaacgcctttgttgtttgtaaggccagcttttgtagcttctttacgcatgttggaaatatcttgagcaggttttaagtgtttaggacaacgggagatacagttcatgcagtgaacgcatttccaaagaccattgtcataagcaggttgaatgtgagccataggtgcatcatcacggctatccaatacgaaacggttagctttagtgaatacatatggttccaagaaatcgtcttgacgtgcagtcaatttgttacattcagatgcgcagcaaccgcaaaggatacattctgtaccagcaacgaattttttgaaatcagctggagtttgacgaacgattttgtcgccttcgttgaattctgctttaaggaaaatccaaggagcaactgttttcaaacgatcaactttagattcccaatcaacaactaagtcgcggattacacggaagttgccgataggagcgatagttaattcatctgtaccataacgttctgtcaattcatcaattttagattcacaaccaagcattgcttcgccatttacgcgaatggagcaagcgccacaaactgcggaacggcaagctgccaagaatgttaatgttggatcttgagtatctttaattttttgaaggccccaaagaattgtacggtcaggttcgtaatcgaatttgaaagtttgtacaaacgcgcgaccttgttggtaacggtggatatgataggtgatttgtctcatcttagtacttcctttcttgtggttcgtatttagtgaacactacgtcgcgttcagttaattcgtattgaccgtctgcgcctaatttgatcaaagaatgttttaaatatctttcatcattacgttttggatggtcttcacgaatatgagcgccacgggattcacgacggtgtaaagcgcccattgcaatagcttttgctactgttaacatagaaccgatttcacaatagtttacgaatgccatgttgtaagtacgttcagggtcacctacataacaagttttgtaatcttcgatcaattgatcgatttcttttaatgcttcagtaataccatcttcattacggaagatacctactttattccacattgcatcagccaatgcatcgcggatttctacaactgggcgaccgccttcacgagttgttacttcagtgaatttagcttcccaagcttttgcagctgcaactaattctgcatctacgttaggttgttcatgtgtttcagcatagtcagctgcaccagcaccggatactttaccgaatactacgccgtctgccaaggagttaccacctaagcggttagcaccatggatggaaatacaagaagcttcgccggaagcgaacaaaccaggcaattcacatgcacaagttttgtagtctactacgtcgataccgcccattgtatagtgacatgtaggacgaataggtactggttgagtcaatggatcgcagtgttcgaagcacattgccaagtcacggataccatgaagtttttcgatgataacttcaggtcctaagtgacgaaggtcagctactacgtatgcattaagaccagaaccgaaaccacgacctgcagcgatttcatcttcgattgctttcgctacaacgtcacgggatgccaattccattttatttggcgcatattttttcatgaaacgttcgccttcagagttaagaaggtaaccaccttcaccacgaaccgcttcagacatcaagataccagtacgaccaagaccagttggatggaattggatcatttccatatctttcaagccgttaccagcacggaaagctgctgccatgccatcgcctgtggaaaggaatgggtttgtagtacgagtccagaaaatacggcctgcaccaccagtggacaagatgatagctttcgctttaatttgttctacgcgaccttctttcatgttccaaactacagcgccaccaacatgaccgtctgcagatttaacaagatctaaaaggtaccattcttgtaagaagtgtacgccttctttcaagcattgttcgtaagttgtgtgcaaaataacgtgaccagttttatccgcagagtagcaagtacgtggataggattgaccgccgaagttacgttgcgcaattttattttcttgtgtacgagagaaaggagcacccatgtggtccatttcaagtacgccttctggacaacgagagcagaagaattcgatcgcatcttggtcaccaagatagtcagaaccttttactgtatcgaaagtatgtgtttcaactgtatcttcagctgctacgttgttcaaacatgcattgacaccgccttgcgccattgctgttgctgaacgggttgggaaaattttagtaataagtgctacatttaagcctttgcgacgaccaacttcaagagccgcacgcataccagcgccaccgctacctactactagaacatcaaactgttccataatgacctcctcataactacctataaaaagaaaatttcttagactatctagattcaaaaaccttataaaaatttttgataacctaatcatttttccttaaagaaaagcctcacacttgtgcgatttttcttatagctttacttataattatagtgagcattgtcccgtatgtctaaaccttattatgcataattaatttcgatgattttaattgatactctgtatcatttcacatttttgtagatgaatcttgaacattccgattacattaaatggaaattctatttatttttatgtatatcatttatattggttcggttccgaattttttactttatcgctaaccatatgaggccaataaatactatgttttaccgactataccaccccaataaggtcatttattgttatcaaaaattttaaattcctactaaaaatacacggattttaaatagcttatgtatattaaaacctctcgattttagtatactttttacttttgataattattatcataagtttttattgtgattttccttacatcttttaaaatcggtaaaatcacccttatctatgcatatacggcaatcttcgatatacttcattttatgaaatctaattatactagataaaacttataatagtagtgcttacatactatatatatgaatatataagggttttaccatttattacattcatttttcactcattccatttgtataaggtatgataatagataaattagttatataatataacttaaatatgttaatattaatttaattactaatgtgttgcagctttcacaaaatggaatctgattagtaattaagttgtattaagagagagttatataatttaatcatacataaggagaacaaacatatgaagattttacttgtagaagacgaagaaatgctgaatggtattacggccaaatatttacgcgctgaaaatatgactgtcgatacatgtttcaacggtcaacaagctatcgattatgtaaatacatctagttatgatgtaattgttatggatatcatgatgcctgtattggatggcattagtgcattggcccaaatgcgtaatgaaggtaatacaacacctgttttattattaacggcaaaggattccttacaagataaggttactggtctcaacacaggtgcagatgattaccttgtaaaaccattcgatctcgaagaattgacagctcgcatctatgcattagcacgccgtaatgcacgtcatgcacaaaacgacatcaaggttggcccattgacaatcaacgttcctcaacgtacggtcaaacgcgacggcgaagcgattacattgacggctaaagaatttgatttattgtattatttagcaagcaacgaaaacatcgttttatcccgtcaacaaattttagatcatgtttgggaatacgattatgaaagctactctaatctaattgatgtatatattaaggatttacgtaaaaagattgacacggatgaaaatgtgaaattaattcaaaccgttcgtggagtaggatatgtcctcaaaacagaaaactaaggaacaaggtcacgaccttaattctatgtcgggtgcatttaagcacctgtggaatcgcattccactaacctttaaaatcatgttgtggtacaccttattcttggctacccttctgatttctatgtccattttctactataactacattggaacggcgcacagcgcagaggtccgggaccgattgcagcaacaaacactcatgatgtctacggatattcgcaagttcaagccttatgaagatggcacattctatttagtctacacacaagatggtctcatcacaaagggatatttaccagatggattcccaaatcagtccagtctatcactgggtcaaatcggtgaagtagaggctaatggtacaacattctattattacgatgtaccaattaatgcacctaactaccgcggattcttacgggctattacgagtcaaaagattaccgatagaaatagcaataccatttatgcactgttgcttgttactatcgtagccttactcgtttcatccatcggcggctatctattcataaaacaaggtctaaaaccattgcgtaaactgactcacacggccaaggttatcggtaaaaacaacgacttgagtcgtcgtattgaattgccggaaattgcaaaggatgaagtttacgagttgacgaccacattcaaccgcatgttgtccggccttgaagattcatccaatcgggagaagcaattcagttcagacgtatctcatgaattgcgcactccgattgccgttatccaagctgaaagtgagtacgccatcaaatatgcgcgcacaccagaggagatgcaagaaggcttgacccacatcttagagcaagccaaatttatgtcgtccctggtatcacaattattggatgtagcacggttagaaaataactatgaaatgaatgtagcccctgtagatgtaagtaccatgttaagaaacatgatacatgattacactcgactttgtgcagaaaagcatatcatcatcaatgctgatatcgatagtgatttaatcattacgggtcacgaagtatcgttacgtcgtgccgtaacgaatcttatcgacaatgctattaaattcacaaaatcgaccatcaatattacggctaagcgcaataatctatatttgatcattgaagttaccgataacggaattggtatcgaggcagataatctatcacaaatattcaaccgcatgtatcaaacagaacaatcgcggaataaaaagtctaatcacggtataggcttaggcctctatttcgtagacaaggttgttcatttacatcacggtacaatcacggcaaaaagtgagctaggtgtatttacgaccttctccattacccttcctctatcggaagaattaatagaataatgtaacacgatgtacataaaaaacacccttctacatgacaggtctcaactatgagaaccgctcgtcatatagaagggtgttttcgtatatataaatactgtaatttacttgtaagctatacaaggtgtttaaccgagtaaagctaataatggtacatagacgtactcaaggaaactccataccacaaggcccgccacggcacctacaatggcaccattgatacgaatccagctgaggtcatcctctaccttagactcaataaagtagataaatttatcggtgctaagtccgcccaatacttggcgtataatggtttcaatgagatcatacccttgttctagcacataccgtgcaatatcgtggagagttgtttcaatgcgattgcgaagatcttcggattgaccatatacattccaaagttcaagggcgatattcacaagcacttgcgctggggtttcaccattttcatcgccttccacaagtaactcttcaacgtacgggcatagatggttctcgatgatagattcccaatcttgttctcgtatccaacgctcccatgcctcatctaaagcatcacagaccacatggttttcctcaatgtgtcgaatcggatctacccactgacgaagccatgctgtccgctcagggctattcggacgtttccagttttccaacatggcatacgcctctgtcacaatagcctctgccatttcgcgatagttcacaacatcggtggcctcggacaaggaaatcaagaaatctgaaaggaagccttttcgttttttcttatgtgcttcctctgcaacaacggccgttaaccacgtaaccatagccggatggttgatacgttcttgaatgacattcaaaacctgtactaccatgccttcatagcgattatgttcacataaatcgagcaagacatgctttaacactggtacaagggaatgtttttctaataacgtacgaatgcgtttggcaccccatcgcgaccattcctcggttgtttgagatttccataacaaatgtaatccctgatgaatgacaaggcgtgcggcccgttgcccctctggggataataggaatttttcaaataaaggtacgaattgcacctttcctaatagcacttggcaacgatctcgcgttaacatcttcgtttctacaagcttaattacaccattgatgaggcgttccttattccgaggaatcaatgccgtatgatacggaaaccctaaaggcttacgaaataatgcggtcacggcaaaccagtctgccacactgccgataagagccgactgcaccgcccaataaagcggttggtaccagctttcatcatcatagaaaaactggcccacaaagacaataccatagagcacgaccattaagccgaagataccattggcccgttgtttcaaggtaagcgatttaatatatcgtatcatccgatcacccccttaatgaggagggtaacgccgtagaacagcccgccgaggacggcccccacaagtgagccattgatacgaaccatttgtaaatcataatacattttaccgcgtataatgtgcgtaatctcgtccggtgaataacgagatagttcttcgcccaccacacgatcgataagagggttcaatttttgtagccatggaatgctacgcaacaagaagaatcgttcaaacggcgcttgtttctcaggatttagaagtatttcactgccgagcacgttaaatcgttcgagcacaatatccatgaggcgtacccaatcgagcgtatccccatcgatgagcttgccttcccattcttcgaggaccattttaacccattggtccttatgttcttcaatgaaagcctgccattcctcattagtttccaaattattgaaaaatctgatggcctgcccccatatatagcgtcccaatggcgaatcgatatcttcgttgtcttgtaaaaactgaactgcttttttctgtaccgtatcaactaatcgttcaggtgaaagcccatcaccaccaaaggcaatggctagttcacgcatgaatgaatccttagtataggttttcataatgtctagcataacgcgatacaaatatggatacacctgatttgacgcgataacacgctgacaagttcgattaaaataaagccaaaacacgctagccgtatggcgttccagcatgcaacgaccgaatagaataacgagaggtgtggccttccaattggatacccctttataaacagccttattaatctccttacgcatcggctcaatatccatatgggataaaacttgattgccaacgccatataagagttctctcatctgtttttgccctacatcactcatgccatattcgatgatacgcaccataacgcgttctcgtttgatggcatagtacatttgtggcacccgaagtaattcttcgctgagcatggtccggccaatctgtattaaccgttctttactacgcggcaagatagccgttttgaaaggaatacctaaaggctttgtaaaaagcgctgtcactgcataccaatccgccaaaccgccaatcatcgcggcccccgaaacgtgcatgataaacgcccacagtgcatcgtgcctatgagggtatgaaattaaaaatatgatagccatgacaaccaatagggtggttgccactggtttagttttcatcatcacttgatcctaacttactcaattacgtatatagactctccccatacaacgtagtgaccacataggtcacgacctttcacaaactacaacttgtgaaagtatatttagaatgtgcattcatcgccatctttttgaggctcccatacaggaacatcgccaaagagagctttaaaatacacggatggcgtccatagtggaccatttagatgcataggaataaacgcctttttcacctgcacgcggcgtaagaattcaatagcaccccattccatggcatcttctaaacgattatctacagggaacatcgccacatctacggatagaccgtctagttccttaaattcacgccaagccatgcgttttgcatccgcattattctccggcgtatcgccaagccaatgccaccagttaaggtcacccgcatggaatatggagtcagagtcgatatttgcagtatccgtttttacatagaaagaaccaccttcgtcggtgctaccgtacatatgaatccctacatcatcgagatttgcatcttggccaggtcgcatggtaatacattttcttaccttaccttctaatggcacatcttgatggcaaatataacgcgttttaggaccatcaaactccgtaatagacggattaaaatgatctgcatggctgtgactaataaaaaaccacaattcacggccacgctttgccaattgccaaacaatattgtttggatccttataataatcaaacacatagcagcgcttgccatcatctacgaggaagccgctgtgtgcgagaaatgttacatctaacatcgttatcaatacctctatattactgagaatttatatcattcgtattctttattataccatatttttctatatacgtttgtgtaaaggaaggccctatttccaaaaagcctccaccggccgggtctgtccctacgggacagggccaaagtcgttttttgaaaacagggccttcctacactcagtatggtagaaatatttaggtataataaagaatacaaaatgattttagggaaacagggataagaaatgccgctggcatttcttatatgcggccagcggctttcatgtagtcgatatattggttaccccatttttcaagagatgtaagaacggttttaaagcctgcacctacttcggtaaggctatattctacctttggtggaatggtgtgccgtatacttcacggtgtacaaggccatcatcctctaattggcgtaacgctctagtaagtgttgcttgtgtaattgggtataagcggcgctctaattcacggaaacgcacaggaccttcagataattcatgcataatcaataaagaccacttccggctaataacttttgactcgttgcaaaggggcatctgaccactaaatcatgaatatttacgagttgttctgccattgtaatcctcctgttctgtttatattacgttattcaaatcatatcacaaatttatcgtattgcaatcattttatagtatcattttttagggtacaaagctttttgaaattttttcaattagtattcaacactgattctctatacacgaaagaaccgctagtaaaaactagcggttctttcggtatcttatttcatatttactatattagtaatacagtcttttacgctacatagttcctgaacaaaagtttctatgttagcggattttatcagatgttatcccaataatgttttcacatcatagttaaatttagcggttgtttcagcagctgttttctgccattctgtaggtgctgtgccgtctttctcaaggaagaatccagagtcaaggtagcgaatgatgatatagttagaatccttttgatcaaaccagttaccacgactgaagtcgataccatgacctgtgttacgtgttacgatagcttctaataatggcaacgtaatggcattcaaggtgattttcatatcacatttgtcgaaaatctttttgaagaaggaactaggtttttcttctttatagactaacaatttactaattgtaccattagatgcacatattacgcggcgaatttcattaatagggatatcaatcttaccatttgagataacaccatttttaatggtgatttctcgtttccccatgtaggagtaatcaagtggcaattgaagggtatctaaatttgcagggaattccgctgtcaatttatggcgagcaaaggcagcaatgattgcttttgtttcgcggatattgtgaccagcattagattctgtacggtccgtatctaaatcttggccttttatatttttccaattatggtctctaaacataatcgtatagttactatttgaatttagatatcttgtaagatatagctcatttacatcttcaaaatcaatgtcagttataacctttccatttgcatctttgcaaagtacaccattgtaactaatagttaatatacgacctttatcttcaaatgtaacaggatttgtgtcgaatacagaaatcataattctctccttctatactttcacaagtatgatgattactatacacaaaatatattgttaattttattatatactaaccagaattgaaacacaaaaagctggctcatagagccagctttcagcatatcaaaacatatacaatatatgtttatatatgaagttatgcagctattagatgctttcaacagcagcgatagcagcaacgtctacaacgtcttgagcagagcagccacgggaaaggtcatgaactggtttagccaagccttgaatcaatgggccaagagcatcagcgccggagaagcgttgtaccaatttgtaaccaatgttagcagcttgaagatcagggaaaatcaagatgttagctttaccagctacattggaaccaggagctttcttttctgctacggaaggaacgatggaagcgtccaattgtaattcgccatcgaatttgaagtcaacgttgcgttctttcaagatgttaacagcttcaaccactttgtctacttctggagtggaagcggaaccttttgtggagaaggataacatggatacgcgagggtcagccatgccaacaactttgcgagctttttctacagtggattctgcgatatcagccaattgttcgctagttgggttaggcaatacgccgcagtcggagaatacgagcataccgtcgtcgccatattcttttttgcttgtgaacatgaacatggaagaagatacagttttaagacctggtttagtacctacaacttgtaatgcagcgcgcaatacgtttgcagttgggcaaccggaaccagcaaccatgccatctactgcgccaagacgaacaagcatagcaccgaagaataagcagtcacctttcatagttgcgtcagctttttcagaagtcataccttttttagcgcgcaattctacgaatgtatcaaccatttcttggtaacgatcgtagttagctggatcgatgatttcagcaccttctacggatacgccaacagctttagcagcttctgtgatttcagctgggttacctactaatacaggtgttacgaaaccttctttcaaaatgatttcagttgctttcaatacgcgttcatctttgtattctggcaacacgatttttttacctaatggttttacttggtcttttaatttttgaattaaatccacgatttttgcctccttaacattggcttatgccatatcaatactattattatagcaatttaatagctctctaacaaccattctaaaacatttcgttgttgaattccgtcataatttgcatttttatttaattcatctaatgtaagtaaaaactttggatattggtcttgtacagtctcaagaggtgcgagctcacgatttagcgtattagaatctaatacagtttcgcttacctgatagtattctgtaacacccgctttttgtgcaacaaaatcgatttctcccttagctaattgacctacatatacagtatatccacgacgaatgagttcaagaaaaacgatattctctaaaatatgtcctgtatcacgactcgcgttgccaactaatagattacgtaatgttgcatccacacagtagtactttgcatttatacgcaataattctttaccgcgcacatcataacgattgaccttatatagcaacaagctatcttgcaagccttgtaaatatcgttctaccgttttattatctatttttctaccggcgctaacgagcgaatttgcaatcttattgggtgaaagcaaactacctatgttagacataatatatctcacaatatcttgtaagattgtaacatcactaatcttcaatcgagctacaacatcatgtaataataaggtattatataggcctcgtagatattcttgtatatcaaaatcttcgccccctaattgttgcgtataagggaatgagctttcacgaagataggactcataggcaggaattaaagagtactgattaccatcgtatttgctatggtaaaactcactaaaggacagtggtaacatctgaatttccacataccgcccagtcagtaatgtagcgatatcggatgacataaagtatgcattggagcccgtaatatataaatctgtattttcttttacaaacaagctatctacgacgcgatgaaactgatcaacgtgctgaatttcatcaaggaaaatataattcatttcatcaggctgcatacgctctaaaatatattgatacagcgcatgataatctcgtaaattctcatattctagttcttcaaaattaatggatattatctgttcaggtttaacgccttccgataacagctcatccttaaatagcctaaataacgtagatttcccacaacgacgtataccagagacaaccttaacaataggccgattccgattacgtcgtaaaaaatctagatatccttggcgctgaattaatttcataagggcctcctcatctatgtacgttctcatagatggaaccctcttattagtattgtcaaatatcatatcgactacctaataactttggattccattccaactttatattaattttatcataaaattggattttattccaaagttttactatttagtactcaaatatggattctattccaatgttttatacaaagaacattctatactatcagtatcattcttttacctaaaaacagagtctccttatgttgaataaccaccacataaaacagtacaatactagtaatagaaatactgtattacttagaaaataatctttaccttacattacttcgaaaatactgtttacctcactagtttatatgtaatatgggaggactcatggccaacacagacacaacaatcaatgcagttatcaatcctcaaatcaacgatgcccccatcgatatagagaaaaccatcaaagccttagaacgcaacaacttcgtggtccattattttgaaacaggcgctgacgcagtggcctatttacagtctcgcattcaacataaacgagtggctatcggtgattcacgcaccttattggaactcaaggttcatgatgctttgtcccaggtcaacgatgacataacagatattcagcgacctcttcctggtgaaagtttccgcgatacagcgctacgcaccatggggcgcgatgtatttttaacctctgttaacgccttagcgcaaacgggtgaaatggtcaacatcgatggtactggcaaccgtgtagcggcctctctattcggatcacaagaggtctttttcgtactaggacgtaacaaaattacgcctgacttggcctctgccatctaccgggcgcgcaatgtggcggcaccactgaacagcaaaaaaaataaaaaaagttccctcaatccttgtgccaagctagaagaaaaatgctacgactgtggttcgcctgacaggatttgtaatgccttaacgatttattacaagaaaatgcgcaacatgcaaaccatggaggttattattatcaacgtggatttaggattttaatgaaattctatatgtcgatgttctatgccgtgaaagtcgataaagcctaagtcagggcctccaaaaaatgtatctaagggcatattatcaaagccattgactatcctacacagcgtagatatacgagggtctatattccccttttccagtccgctaatataggactgtaacaatcccgttcgcttagctaactcttgttgagttatatgatagtggcggcgccataagagaatgagaacgcctaagtgttggatagccttttctgactgtgtttcactacatacgatatcatacgtcatagaaacctcactttctatactatccttaataacaactctttgcctccacaatacggcaaccaattaagaggaaccatagcaacttgaattgtgatgacatataatagaaaatcccttgcgatacattcatatcgcaagggatttttattcatattatgttataaaattatgcttaaacatacatatatgtatattcttgtacataaaagtcttatttattctcttctgcaatagtcatagcacgtttgatttccatgtatttaaccatgccatcaacggcttttttagcttcgcgcatcgcaagtactacagtagctggtttatgcactacgtcaccaccggcgaatacaccttcacggcttgtcatgccgtatggttcttcggatgtgatgatatagcctttttcgtctacgcgaaggttgttaccttccccaacgaggcgtgcattaggtttatgaccagcagcaatgatgatcttatcgacaggcatcacttggtatttacctgtgccgtggatacccgcaccatcgtcattaagggccattacttcgtatttaaagccttctaccttgtctttaccttctacaccaactggagatgcgaaccattggaattgaacaccttcggcacgggcttcttcgtattcagataacaaggctggcatttgttcttggctacgacggtatgcaacagtgacagattcacagcctagacgtacgcatgtacgagccgcatccatcgctacgttaccaccgccgatgataacaacgcggtcccctttcttcacaggaatcgctttttcttcaagctcaccattttctaccaattgtacatttgttaacaagtacattgcttggaatacgcctgtaatttgatcgttttccatacgtacttcttgaggaatatgtgtacccgtaccgatgaagatggtatcaaagccttctgcaaatagatcatccaaggatttatcttggccgatgaatgtattacatacgaatttaacgcctaagccttcaagacgggcgatttcacgacgtacaacggacttggacaaacggaactcaggaataccgaataagagtaccccgcctggttcggattgaccttcaaatacagtgacatcatagccgagttttgctacgtcgcctgcaacggacaagcctgcagggccggaaccgacaacggctactttaccgagatcttgtttaattttcttaggtttgcgcaatccattgatgctttcaaaatcggcagcaaaacgttccaatttaccgatgttgataggcggtttcttagccttattcatgatgcagttgccttcgcattgattttcgcgtgggcacacgcgaccacagatagctggcaagtttgtacgttccgccaagatatcgttggctaagccaaagttaccgcgcgcgatggcttggataaaacgaggaatctcgttttcaatcggacagcccatgcggcacaaaggttttggacaatttagacaacgtttcgcctcagcgagcgcctcctccatcgtataatccgcatcaaaatgaagtggttttaattcgttactcatggcacatgcctcctaacaaggatccagtactatacttatacagcgttgcatgcacctaagctgtccgatgagccctctcacatagggacgccgccacatgctgctaacatttatcttttgtaaccattcgatagacgtgtggtcactggtcagacacacactattctatagtacattttaaattgtgaaagcgagctccgtcaagaagctgagctacaatatgcttattttatatacatttattgctataatacatacataaggcaacataaatgaggtattcctatgaacactacagaatttactgaaacatactacatagaccgccgcggttctcattcccgcaaatgggacggcgaatatttaaaatttagtcgcaccgacctactaccactctgggtggcagatatggactttataacaccaccatgcatacaagaggccatttgtaactatgtaacaaacaatcctctaggttataccatgacaaatccaaattatatagaagctgtcatacattggcacaaacgccgtcacaactgcactattgaacaagactggatcactagcgcccccaatgttattaccggtatcatgtggtgtattggggctttcaccaaaccaaacgatgccattacagtccttacgcccgtgtacggagccttcgatgcccgtgccaatgatgcaaacagacacatcgttgcagtgccattacatcgcacgacgaccaatggatatactgttgattacgatgcattcgagtccgccattagtcaaaacgatgtgaaggttttcatccactgcaatccccataatcctgtgggacacgtgtggaccgaagaagaaatggaccgattatttagcatttgtcagcgtcacaatgtgctcatcataagcgacgaaatccatcaagaccttattaccggttccacaccatttacgcccgcactatccgtatccaacggtcattatgcagaccatatgataaccatgtcatctgtgtcaaaatcgtttaacatggccagcttacatcaggcggaagtgatgattcccaacgagacattacgcactcaatataacgcctataaggcgcaagtgtaccacacggatgcagatgtcatcgcagaaacggctatcactgcggcctatacccatccagaggcagaggcgtggctagacgatgtatgcgctgtcatccgcgaaaactacgaatatctatgcgatgaactactctcagccctaccaaagcttcgcatcagccctatggacggcacctatttggcgtggatagatttcggtgcctatgtaaaacctgaagatatgcacgacctattcgaacatcaatgccgtatcgcgccaagctttggcgaatggtttggcggtaaaaactacgccacctttgtacgagttaacttagccacgagcctagctaatatcaaaacagctacgcacagcatcatcgaccatatccgttcttagtcctacgtataaagaggctgctctagcatcagttctagagcagccttttgtcatattttcgtatataggatttcttatttagatcttgcgaaatggtcctttgcaaattgcatatcttgtacgagttccaatgtgccaaggtatttcttatttttgtcgcgaaccgccatgtagtttacatagaatggacggccttgtttttcaagccatacggccacattatcgcggtcccctttacggaaggaatcgatgataccgcgcacgataggttctaccttaggtggatgacaggagaatacatcgcgaccgattgccgtagtagggcgtttaaagaccttttcgccgtcgttaaaataacggttaatgtcttcatggtcaacgaaagttacttccataggcattgtgttaagcatagcatcgagttgatctacagttaacgtaccaccaattaaaccgatggtattgtcatcaccacttgattttctagtttgtgtagctaatgccgcatcagcctctggccaagcaatgcgttttacaccaaagatttcctcatattgtgcagtatccttatagatttggtaccaatcttgagttgtaaagttttccgcacagatagggaacaagatattttgttctttgtagatcatttcttgagcacgtgtaagaagctcatcaaaacgtctataccaatcatctacactttgactagattttgccaaatcacccaattggtctcgaatatcgccatcaacagtccacataaccatggatgggccaccgatagcataatccacctttaattttggatataacaaatcgccttttttagcatagtgaacggataattgacgcactctatttacatcatcaacggttgccgttttatcggccactttaggacgaagctcttcaatcaaatcattaagcgccttattttcttccgtcatttggttgagcggatggcctatcgtttctacaagcgttgttaccgtttgtttcttatcttgagcttctaaagcagcctcaaccttcgcatgctcttcttccatttgttcatgaatggtagaaccgtggaacaaagcggaatgaaggtcgcataattgttgtacctcttctagaggtgtaccttcgcgcataaggccttgttcagctttcatgatttcactggcttctacatgtttaaattggctggcaaaatctttgcgcacatcgccaagggcttcccctgtacctaagcgttttaagaagccttttaattgctctacccgttcgctatcgggtacagtatcctctgcgttagcttctgtattttcactagccttaggttcctcatcttgagtggctggtgcctcaacaggaacatccttagcagatgctacatcatcaccgtgtaggttgggcatatcaccttctaatgtaaaaccagctttcataaaggcccctacaatatccatcatagagatgcccttcatcttagcccctttagggatagtcataattttgccaacggaatggagcatcaccttattggtaatttctgtgaagcccaatcctttcataatatctataacctctggatattcttgtaccaaatcatatacggattttgataaatctaatttcttttccattttgatcccctcgtgtcaaaaatattgtttattgcttatgttagtagcctctatacgttttcgtatataaggtaatttacattccgaaaggtcatctttaataacctataattctatgataaacgatatcgattagaaaatctgtatccatggctatacttttgaaagttattcaaaaaaataacgaatagatgacaaatcaatccataaattggacatagatgtatcatctattcgttaacaatcatcttattgatgatgaggttgcaatgctttttcgtagttttcagcgactgcatcccagttgataacacggaagaattccttaatataatctgggcgacgattttggtaatgcaagtaatatgcatgttcccatacatctaaacaaagaatggcagttttaccttccaaaagaggattatcttgattagccgtagaggttacttctagtttgccatccttgttgaccactagccaagcccagccagagccaaatcgtgttgccgccgcttgggagaagctttcaacaaaagcatcatatccgcctaaatcagcatcgatagcatccttcaaagggccttgcaatttagatgtatcaggttttgtcatgatatcccaaaacatggtgtggtttttatgacccccaccattgttgataaccgcttgacggatatcctctggcacattggcaatatcgccgagaatacaatctacgcaaccataggcaagatccgggtatttagcgatggctgcattcaaattattaacatacgcttggtgatgcttatcatgatgcagtttcatcgtctctgcatcgataacaggttctagataatcataagcatatggtaatggtgcgagttcgaaaggtttcataatagtcctccttttaattagggcacgaacgatatcttaactagtatcgttcttgtgaaagcgattcgatgcacctgcatcggtatttcattgatatgaattatcattctttgcatattgtactatctatatagataaacgtcaatatatgaccaacatttattacagaatatcaatatattcgctattcaaagccttattcatgctacgaacagcacagaatttaccacacatactacaagtttcactatgcccctcctctggagctcggctttcacgaatattgcgagcacgttgaggatcaagtgcacacgcatattgcgcctcccaatctagtacgcgtctagcatcagccatcgcatcatccttatcacgggcacctggtatgccacgtgctatatccgctgcatgggctgctattttgaaagccataataccttctttcacatcgtctgcattaggcaatgccaaatgctctgccggcgttacataacaaagaaaggacgccccatgcatgcccgccacagcaccaccaatggcagctgttatatgatcatagccaggtgcaatatctgtcaccaatgggcctaacacataaaacggagctccgccacatagcgtttcctcaatttccatattcgcttgaatttggttaagtggcacatgacctgggccttcaataatcacttgcacacctttagctcgagcgcgtttagtcaattcaccaagtcgtaccagttcttcaatttgacatacatccgtagcatctgctaaacagcctggtcgacaagcatcacccaaagaaatagttacatcatactcacggcaaatatctaaaatatcatcaaaatgttcatagaatgggttttccttacccgtcatgctcatccatgcaaagataagactaccaccacggctaacgatgttgagtctacgtttatgctttttaatttgctcaatagtttgacgcgtaataccacaatgtaaggttacaaagtccaccccatcctctgcatggagacggatagtatctaagaaatcctcagcagtaagttctgccaaatcccgttgatgatgtataacgctgtcatatactggtacagtaccaatcatggctttacattcgctagttaattttcgtctaaaaatacgtgtatcaccatgagtagataaatccataatcgattcagcaccaagttgaatcgcccaatttaccttttctatttcactatcataatcggtaacgtctctggatgtgccaagattcacatttattttcgtgcgcaatgctttaccgatgccctctggatcgatacaagtatgattcttattacagggaataacaacttgtcctaaagcaactagcgctcgcaattgctctacatccatgcgttccttttctgctacaattttcatcgcatccgtaacaaagcctttttgtgcggcttccaattgagtgtaaaacataatatgtcctcctattgaataaaaccttttagctttgtacacaagaaaaagggtatcgatataatatgatcgatacccttgaatggttttgcgtgcttcctacgcgggcatgatcccgatcaggtcaaaggtcaggtgctaacagccctttctcagcctatctcataggctcccttgcatactctgctatgtaattgtgtatagcatatcactatttaactaatatttcaatctatacctctattacaaatcattagctacttcaatctgacattgacgcatagttaataatgctgcttcatggctttcctcagtaacccctgcacagcaattaggatctacatgaataggaacctctggcaagccagctttcaacaatatggcattcgacacaacgcacacatctgtacaaacaccgaccaaggttatactttcaataggctcagctgtattcataccttgcaaacgcgtaaccaattcagaggatccaaaattaggtttatcaatgataaagtacggatggatggtattgcgtttttctgcggccgtaatgaggctctccataatttgccaaccaatcgtatctttcacacaatgcacaactggcaaatactgaccttcttggctttcaagataattcgtatcgtgagtatctcgtgtaaaaataactggtccatcaaaggatgcaattttttgacgtacattatccacgatggcctgagcctctggagaaccaagagagccatccacaaaatcatgttgcatatcaattacgactaaaacgttcatgttctatccctccacaacgacatggtgcacccgattcggcgtattatgggcaatgcgacctgctgcagcggccgccacggcaccaactaaatcatcaagaaacgtattgcagtgactatcaacttgactatctagatttttaacaatgcccggttttaccttatcaatataaccatagttcgtaaatccaatagatccgtataaattcacaatggataaagcgaggatttcatcaataccaaacaacgcttcatcacgagtcatgatactttgtagtggctcagataatttcttctgctccgccaatctatccaattctatgcccgtaatgatggcattttgtgtttctcgtttttcaagtacggcctgtacactctctacgcactcgtccatcgtcaaatcaggaatatatggttgttgaatcatcatcacaatatctgcaatgtcctgaacggtaacgcctcgttcctttaataaattatacgtacacgcctttaattcctcctgagatatcataattgctcctcaaaattatacaaatttacgtaacacattataccttgattataccacgaaaaaatccctaccgacgttctatcagtagggattccatgattagattttcttaaccatttcagatttcaatgccatcgcaccaaaaccatcgattttgcaatcgatatcgtgtccgtcgctcgcatcagaaatgaggcgaatgtttttaacacgcgtaccttgtttcaatacgccagcaccttttactttgaggtcttttacaacaacaacggtatcgccatcagctaactcgttgccgttagcatcgcgaatgatacctgcttcagctgcagcttgtgcgtcagccactgtccattcattgccacacatagggcagataaacatatgaccatcttcgtatgtgtattcatcgccgcacttagggcagttaggtaaatttgccatttagatctcctttttcactacataatgaaagtattatacatttatcccttcattgaaacgctcgtaaatttagatttaattaatctaagcacatcatataaatatttatactatattagttctagttcttgctttaaagctcgttgtaaaatttgtgaaaaattaagttgtttctcttctgctttatgatttaaccagcttgggattgtgagagtcttttttatagccttgttatctgttctttttaaatactcttcttcgtcccattttactaaatctataaactccccttcattacatttaatatcgattggattacttgcttttggaaattcctcgccatcctcactcaatgaatataaataaatacctagtgcatcttcagccatctctaccgcttcacataaagtattgccttcagttacacagcctaataaatctggaaaacttaccgtatatccattttcaccgtctgtactaaataaagctgggtacatttcctttctcattatttcctcctatctagacattcagcttgtgattatcttaactccaccattttatcttgatagggggctatttaagccccgcttgcttcaagattgtttgtaatgttttaggttttaaatcttctttatgtagtgctatagtcactcgcccattttttgttggatgttttaatatatgatgtgaacctctaactctatcaatataccaaccatcctttgttaaaaccttcattaactcttttggtgtggtcaaactttaatcaccgtccttttatatttttgatttatatatatattaatacgtatttatacgtatgtcaattatttgtaatcttgattcaaaagatgttcatacaactctaacttatcttctagattattcttatagccttccaatcgtttaatttcggcatcaataaaccgataatggtcttgtaacagtgtcattctttcatggaccgtatgagctccagcataccgcaagtctgcataccgcttgatattcgcaagcggcattcccatgtctttcaggcgtttaataaactgcacaaaccccacatcctccgcatgataattgcgaatgccgttctgccgctcaatgtgaaggaacccttgatcctcataatatcgtaatgtagaaatagacagtcccaccaattttgaaaattcaccaattttcatactttcaccaccttgacctcaagtatactcgagcatatatcatacgtctagacggaggtaataattatgaaagaaacacgttttaacatcggtatgaacacattgaaacaaattgacgggctgcacggcgaggaggtgtataacacaattcaagagatttcaccggccatagccgatttgttggtcgagctgttcggcgacatctacacgcgccccaatctggatttcaaggaacgggaactgattacactcgcatccctgttaacgctgggcggttgcgaagcacagctgaaagtacacaccaatgcggcactcaatgtcggtatcgcgcccgagcaaatcgtagaggtctgtgcccactgcatcccctatgcgggatttccacgcgtgctgaacgcactgtttacagtgaaagcggtctttgaagaacgaaacatactgtaattaaggaacgaccgcaacaaaaaatctattactaaatattagtctatttataactaacaaagggagactcttgataaagtctcccttttattcgtgtaaaaatcgtaagaaattaattcgtatttttcaatattcaaattccgctatatactaataatgaaagagccattaacgtgagttagataaaaaataaacctaacgtttaagactaagtactgcaatacttagacacgttaggtttatcaaattcataattctttgatgagcctaacgcctagaacacgttaattggctcttttgtacttatagtatagtctgaattctagagactgtcaatttacctctcttattcgaattgactatataggttaacccctttataatgtagtaaagagatagtcgacgagtggttccgtcaggctcatcccaaaacattataaaacatgcagaaatggcctttcgttttcagctaccagttggtaacgaagggctatttgtcgttattacgacaaatcagcactatcaatgctccaaaggaaataactacagttaaaatcccaaggacaatcataatgatttcgtaggcactcataggcttcacccccttcaaagaaaaagggcgacccaacctcgtcgactatcttaattacattatatatcgaacttatgttttattcaacaaataatattaatacaacctaagccaaaaaataaacctaacgcgactaagtactgcaatacttagacacgttaggtttatcaaatttctcaattctttgatgagcctaacgcctagaacacgttaactggctcttttgtacttataatatagtctgaattctagagactgtcaatttactaccccaggcgtttacgcaagatagcatagagaatcatgctaataataacgctcataacggcttgaatggtattagtcacaatactagcaatggctacgcctggatcgaagacaaagtattcggcgatgaagtagcctgctacgataataataccacctacgacagttgctaccaaagcagaggtagttgtcttattgttatagacagtaccgacaagatagccttcaatgcctttcaccacaaaggtgattggtacaaagactgcgtagccgaggaataaatcagctagcgctggcccaatagcaccaatataggcgccatattttcgacctaataataaagcggatgtcatgataacgacatctccaacattgaaatagccgcgtatgccaggtactggaattttcgtatacattgtaagcaatgtagcgagggcaatcaatacggctgtgagtactaacgcggatgtagtactgcgggtttgaacgtgttgcatagcgtcctccttataaagaaaataggcatgtgaataattacatcacatgcctatactataaacctttatggtaacacttgtaaataaaaggaattaactatagaaaatactattaacggtactcttcaaaacgttcctctacattgtagagaacctcgcaatcacaaccgccaccttcgttgataatccaatctagtacgctttcaacatctaccttttgtgtttctaaaaattctcttgtgaaagtaaaactatggtcgcaaccgtcattcgcctctaatttctcgtctacatagtcaaagagattccaaaacaactctgcgtccataggtaagctattttgaaaattctgtttttctttagctttatagtctttcaataattcctttttacgtgctttgtccattgtaattattgccttttcataatttattactcatataattccggtcgttctaatacagtgccatacttcaactttggtaatttaattaattgaggatacaactgcttaacctctttacaagattttaatgtaagatgttctagattatggagttctaaaataggagaataatctgtatccatcactttagcggtcaagaagctaaagaatcgcagctgtttcatatgacgtagaaatcccaatgattgaaccttaagaattttaggagcggcgaagtcaccttctaaggcaagactttcaagatgttttagattagctaatggcgcataatcatcaatttgttgaaagttttcaatcgacagagctactaaatttactaatcttgaaataggctctaagctcgatacacttcttccggacccaatgtgtaaatattttagttcttgtaatttctctaattttgaaatatcaggataaacgccccattttatatgtaattttttgagtctccgttggacacacaccgcatcaaataagtcctgtggcattcttgtacaaaacataagctctgtaaaagtatctggattatttactaggaaatcacaccactccatccaaattcgcttcttagctttagcagaataagactcttctaactgtgtgcagttaattatcagcttgtcttcaccatcatattcagagacctctacaacagatttaggccgtgcgtcatccttatgatagtagtcaaatccatatttaatttgcttttctgttaacactgccatgttacaattcctcttcttcgccagtcgcataatcagtttggctataactagatccatagccaacagattataacgggcctagcaaatcgatacaagcacatgcccgttagcctctagcacttgtttataaaagcgtttcatttgctcgaaatcgtgaaaaatttcgtctttgatttcttcctcttcttcttcatagtcccagatatttggatacaattctgcttctttgcaggctttcatatcaaaagattcgagtgcactttcaatatcaaattgatctagagctgccacgatattggctaaatgattgtgttctgtatatgctacatagtctgatatatcctcaacagccattacgcctagtaccgcttggctaagaggatttttatcgtctttatggtcagtgcccacaccagttagcacaaaatggagtacatcccacatcttatcgatatcgagcaataattcatcatcgtcattccactcttcaacgctttcaagaatttcctcttcttctgagcccatagctttaagcttttttaaattcgcatcgcttaaacagctataatttgcaatcaatcccatagtctaaaccctccgtagattattagtggtcaatctctgtcagtagttctagcaatttcccctcttcttcattagcttcatccaataatggcttaccaagtaaaagtacttgcagtgagtagtaatagaagctaaagaacaggtcatccggaaatacctcttcttcctcatatctaagaatatcttcatcttcatcgtactcttcagaccaaagatattcttcgttgagcatatccgcaaaactcggtagtggatctgcatgttctagcataagaccatctctaatacactcagcaataattatgaataattcagctaattcttttactaaatactttgctacctcattatgaccttgttcttcaacggcttttttaaaaatacgtaatagaaaaatcaatgcaaagggcgtagcatgccataaagtcgattgatgctcaatgttttgggccagctcttcacctgccacatcaatggcaccaacgttcttcatatcccacaacacctcaagatgagcaggaaaatctgtggcacggccgtaagttgtggtcaaacgatgccagggtatgtcactgactttcacagtttctatatattgtttcgtcacagtatccattaaatttacacctttatagtaacgcattctcccgaagattatttctgaataacctctttcaccagttcataggtgtctatgagacgcagttttcctagcctaggattatctacaatctcctcatagatatcttccaacgtgcctgctggtgctagtttccacaatttatacggatatagttcaacagccccaatgatttctaaatggtctagcaataggcctaggtctttatgattaaaccaacagtcggtatcgataccgaaatttgtattatctttccggcaggcgattttactatttaaaaactgctccattgtaggtttttctttttgtaaaagccgcgtacaggccaaatggtactcgattttccgcggtgattgatccacgtcagatacaaaaatagctccatactcgttttcaaacttaacagctaatacgtcgcccaccttaacatgaggttctcgctttgttttagatttacgaaccttaagaggctttggattttcactttgtagttgtacggctaatgtatctaatgccttttgacgctgtttaagggccttgctatcgatttctgaccaaaactcatgagcgcccttcgtgattatggctaatgctttctctttgatatcctgcggcagatgacctatcttccacagcgaataggctacggcagtccaataaatttctgtatagaattcgtcagtacaaaaattctgctcttcagccaaaatttctgaaacaattgtatcaatactagtgccatctctatagcgctcaacaatcaaattataaatatcatggccatcatcactatctatgatttttactccatcaatagccatataattctccttttaagcaatatgtctagaaaaacagcatttgtgattctgtaacggttccatcatcttcatggaaatagcaagcatatacaggttcacgatgcgccgcatcatagaatttctgtaaaacaggtgaaagtttcatgtctatgggcatatgtaaagctttcacaatgggttcccaaagttccatcggcgaataagagataatatccaactgcttattctgaccatattcttcaagtgttgccgcatcagcatacttacttgagtcacagtaatcatgccaacaaatactaaaaacgatcaaatgaaacaaatcatccatactttcagccaaacggcccgcagcaccctcgctactccaataacctatggatccgtcctccaatagatgatattcaccgccagcaccatctacagcaaatgccatccccggcacagagaacgtgcagcgaccttcagcggtatcgcgttcctccaacgcatctagcaagcgaaaatcgaatagcgtatcaaaatcttcagctagtttagcatcatttcgtaatgtttctaaatagtccatattgataacctcttattctatcgactcattaccggttatttcatcggaccatgagcggcaataaaatcatccttactctgttgtagttcttttttagcgaccatgtattgtttcaagtcaatttgtcccttctctttttgttcagccaaggtcttttctttatttatgattctaatccagtctaattgtgtactaaattgagtattaacaccttcactattttctcgtaacgcaagcaacgcaaagacttcatccatgccgagattaaacatgtcgctttcaaaatcgataggttcaaaataatagcgaaccgtatccgccccaaattcatcgtctaatttggcccattctgcccctgaaagcacggtaaagccgagcgtatcgtttccaagactttcagcaaaccaacgcacctcataatcaggctgaacgaaatcgttaaaatatttgatggtcacatctcgatcttgctcatcaccgtaaggaatttgcagctctttatcgcccttttttagcacaatatcgtcaccatagggcttgccattactaaccgtttgaatatcgataggctcatccatcatatcattaaaataattcactacatcttcgtcatactcgcgccaatcaatccagatgatagcttcggaatcaaacaaatcagttaggtcaatatcattggcaaaaaagcttcttaattctttatacagattttccatcgtcactctcctatatatcacttatttttttagatagtctacaacacctgtgtcaccactttaatacaactctataaggtttcataaatcacatcttgttgagccgtaaagttttcatcaaaagaaaccaaaacatatagatgtcctgctggggattcacctatatcataacctagtgcaaatgcgtcgtaataacctgatttatctaacattatatccgttagtgttagcacaacagactcttcttgcggtatttccttttgtatgatttcctgtgctaattggtctaatttatctaattgaacatataattgttcccacattggtagtgaaagcacctcagcctcagtataatcggtgcaactaatattgaggttttgaaaggcttgcgcttcattctctaagcgattagtgcccaatcgtcgagatacgaaataaaccccatgcggttctacagtccagctttcaacattccacaatgtcattaattccgattttctcattaggactctccattaattgattatcctgcaatatccgcatgtacaggattcccctccgcatcaatattggctatgatgcagtgtccccagaaaatatcgtcatcgtcataataaacctctatggtgccatcattgcggaacgccaattcgcccatagtaatacgcttggcaaatatttctgccgtaatcgaatcttggtcatcattgtcgagccaatcgttagcgaggtctaataaggtctcactaatataggtgctaattcgctgttcaaatgctttgaaattatcgattgtattgaaagccgccaacgctacagtacagctttcatcagaaccttcgtctacatcaagggtgaatgcataatcatcaattctcgctgtgtaatattgatactctcgatttaacaggaagtcacccctgtcagtatgaaggtatttaggggttttcaaatacgctgacaacgcctctaactcgctatgttttgcatgttcctctaacacctcaagcacataatagcgattattccaagccgggcgcatatagcctaaatcctctaagggcttagctttcttaactaacaatttatagaccccatgcggctcaaaagaatagccccatctatcatcaaggccctcaataatccacgtcaaaatgccttcgctacggtcaagcacgccagtccgagtatctaggatagcatcggtagacaccagtggtctatggtacttttctaaataaggactagccccattcgcatcactacgcggtaatgcatagatttcaaatacttcagattcaaactctgcttcatattctggtagacgtacaatactcatatgactctctcctccattataatcacactactcatcataatttctgttatatcatgagcgttcagctacatcgattctatgtaataattctttcgctaattcttgggctgttttgaattcctcatttgaaagtaccataagtacaaagctatctgttcctatgtccatatctactaacttatgcgttttccatgtggcattaatatgtgcacaccagtccataatacattgttcttcatctaatcctgctgtatcaatagttagattttcgctagtatctaaagacttgttacgtattaacttctgcacatgataaagaaaatcctctaattcaattttcaaggatagctctacagcgcgacctttagactgtagtttctcatagaggttccaccagctatcttctaagtcttccatggagtttaactttgccttagtcataaacgatttagcttgtttagcattgcctagcaatagcgttgctaactctgtaaatgtagatcgcatctgatcgatatctagatacgctacttctacacacaaactacaatcaggtactctgcgttttttcacaaaagcccgcatcatctttactgcgtcaggataacttacatcagccatacgataggtcttgccatctatatctaagaataaatctactgcatcctgctttttacctacacgtgctttcatggcagtacatccatcgatggcatgaggtgggtataactctatatacataataaatccatcatgtatggcctgtaaggtattatctattcctactatattaaaaccgtttcgattataatcggggctcttcaaacgccattcttcgtaattgtcgaataatttttcttgaatccaattggaaaaactcataaggatgcacctttacttaacaactgtataccaatatcctattttatcttattatatcattatttataaattaaatagcatgatttataagtatattaaataacaatatatagattcaaaaatggggctgtaacagaatgcggttttaccgcattctagttgcagtccctttaaaatataagaaataccaagaaaattagatttgtaaaatcctatgttctcttggtattttttatttttaggcgcacctaaatagacctttaggcctatttaaaaatttcttagtttaagcagtttcttttgcagtaaataatgttgtgttaacgcgtcctgcttgtattctgttatgtaatttttcaatattgaatcccatagccagtagatataacatcttatgcacttttccactgccacggtgtaaaaatcgtctaaacccaagatcttgttttaacacaccaaatgcgccttcaacttgaatggaacggttaattcgtaattgaatgcctgtatcactaagcagtctgtcttggttttctgccaatacagcatcatatgcaggtgtaatttcaattcgttttactggatttactgttgttggtttcatataccgttggcattccttcttgtatccacatcggttacaagattcgcagacatatacctttcgctcagatataaatccggttttgtttttagcattacgagttaaagcatattttaatttacggccttttgcacatataaatgcatcttcttctggtatatattccatattacgagctttactaatatctttagcccaagctctagtttttgccttttcataatattgtggttttatacaagataggtactggttattttttaaccaagttaagttctcatggctatcataaccagcatcagccaccacatatgtgaatcggcgactatggatctgttctaattgctgtacaaatggaattaacgtattcgtatcgttgggcttagcgaatacaccaactcccataatatattcagaatgaacagctaattgtacattgtaggcaggtttaagctgtccattacgcatatggtcttccttcatacgcataaaggtagcatcatgatctgttttagaataactattgcgttcacccataatatacaactgctgttcgtattctttgcgtttctcatatagaacttcagctcgctcatacaaccgttgcaatggtgttttatgcttgccttttccttgtacgagttccatatgttgtacttcaatttctttggctaagaaagtatatatacattcatcattcatataatgggtatctagccctaattcattccagatgtcttgctttaatatagctaatttagagggtaatgtatctagtcttttttgtactgcttttcgccagacaaaggtgtacttgttggcattagcctctagtttagttccatcaataaagacttcattaaatgttaaggtatcacgtctgttaatagcttccatcatctgtgaaaacagattcattaagatatctagtgtacaacgtgcaaaaaatcgttgaaaagtcatatgacttggggctgaatagccttgaagaagccacatataattaatattttcttcgcattgttgttgtatcatacgtgtagaatacacgccgttggacatagcatagacaaaaattttgaacagaatatgcggtggaactttagattttctccctttaggagaatacaaatgctgtaactctttatagtctaattcctccaatacagcatcgagtaaccgcacaggcgctgtttcttttatcaaaatgccataatccaatggtaaaactagttggcgaggcattactagtttggtataattagattcattggtatggtttttgttcataatttaattataccaacgaaaagggtccctcgggcccctttttgcttagaaatacaaaaaagttattagttgatttcatataatcaactaataactttttaaatttaaggggctgttttgttacagccccaataaccagtctaatacattacattgctgaattccattataattatgagatttatagagctcatccatagtgagtaaaaatttaggatactgatctttaaccgcttctaatggtgctaactctctgtctctagtagttggatccaatacactttctgatacttggtagtactctaatatgccaccaggcttttgagcaacgaaatctatttcgccctttgttaattgtccaacatatactgtatatcctcgacgccgcaactcaagatatacaacattttctaatacatgacccctatcacggttaatatcaggtagtaatagttgcttaaaagccatatccactacataatacttaggacgtaatcttaataattctttgccacgcacatcaaatcgttctgtattatataacagtaaactatcttctaagcccctaagataacgttctacagttttgttatctacctttcgacctgcgcttgttaatgaattcgcaatctttgtggggttaatcaagctaccaatattggcgaaaatatatctcacaatactttcaagtaatttaatatctgcaatttttaatcgatcaacaatatcttttaaaacaaccgtattaaataaaccttgtaaataatcctgccgaccttgccaattttccgacatatgtaaaagccctgggaatgagccttcacttacatatttttcatataagaccattcgtgaaagcccactttcactataggcatcaacatattccttataagacaagggaagcatctcaatttgtacatagcgacctgtgagaagtgtagccatatcagaggacataaaataagcattagaacctgtaatatatatatcaacattatcttgtacaaagaagttatctactacacgctcaaatgatggtacatgctgaatttcatcgagaaatagatacatttttttacttggaataatccgttcattaatgtattcatataaagcccgataatctcttaatttatcatactccatcaactcaaaattaatatcaataatttgttcggcagttacattatcggctaataactcatcttgaaacaacttaaacaacgtagatttaccacaacgccgtataccagaaacaaccttaataataggtctatctttatgtcttcgaagaaaatctaaataatatggtcgcgatactaatgacatgcacacacctcctcgctaaatgggttttaaaacctaatcctatatctattatatcactttaaggtttcaaaacctaatttttatgtttttatactataatttaggctttaaaacctaaatttaattatatcgatgcggaatattttttataatcagaaccacccgtaaaacgagtggtttgctcacgagctatatgtccgtagtgctaggtcagcgtctaaagactctggtttttactacgtttaagcaacatagccattgacccgtaacgatttccttaaacttacacccttaaaagtatcctcatattcttttgcactaagtttatctttcatttggtcatgtaactattactcacgttacggtagcttaatttaaacctaccgtacttacatgatccccctctataatcttgacgctcttatattcgcataaacgtcgcagtatttcacgtaaactatttctgtattgattatatataactttacatctatacttaggtgtaaatactatgtggtatttgcataaccattttgtgtgcgcaaggctctgtgtctttgttgccatataaaaaatcacctttcttttgcatataatacggcttgaacacctacattatacttaagcaaggtgatttttttgtataactttcttttccgcacccgcataacaggtggttttatgattcgcgactacgtcgcgaactagtctaaagacaataaaaacaaaaagggagtaatacataaaagtataacttccttttgtacagttcaagactaatctagtttctaatttgacgtaatgtttctggtaacatttgatcaatttcttccggcctaaaaaactggaactcattctcttttaaatttttctgagccttttcatatgctttattatttgtattaggagcaattctatatatattttgagtctcttcacttaataaatctcttcgagatctaatactatcatcatctaaaacatcaaaatcagtaagtaagcttaagtattgttctctaagataccacaaatcattaattgttcctctatgtctagatattaattcttccaaattttgatctcggaaatataaatttagccctaatgatattgtagctgctatacccgcaagccattgtaaacatggaatattagctattaggtctcctaaaaaacctcctgttgagattgcagtcataacaatctgtatgtttttatgacatctattttgcttcaaaagtaaatttaacatttctatatgtgtcgcatatgtatatacaactttcccatatacctctcgtatttgtcctttgagaatagagcggtagtccatattacacattatatttttatcctctcattattttatttaatacttttcctaagcaaatataactattgctactatcaattgctatattacttcctggtgcatataaagttggtgcatacacaccattcatagttagggaattataggaccgaaacaatatatcttcaaacgtttcactagaacaactactagtctcaccatttcttcgccaatgccacataccaattacctgatatacaaaagaatctattacaattccagacaaatgataacttgaaaaatactcatctcgaataaatcttaaatatttacatgtatcaaagagtaatccattgctttggtcaatacgattctttactctcatggcttcttgttctctttttggattagtacttctccagtttccacccatattgctatctggataaacataacttacagtacccaaataatcagtctccttaaatgctggtaatatctcaaatttcataccatcagaaaactgaataactactacctgtccatcaccatgaatactacttcgaggatatggagtcaaaatacaatttttaatagcttggagtaatctagattgtccattaccttttagcctatcataatgataatactcaagccgaggcaattcgaccaatatatcaatatcactggttgaaacagcagttcctcgtccataggatccaacatataaactatgtaattgatcgctattactattccagaattcctgatttattgcttttactattttatgataacgctgcgaaattagacttctagtaattaaatcaattctatcaaaacttttgattattttaagcaaaggattcacctctctcagaagataccacggttacatattagtactctaaaatttttctccatagatttctttccattcatcctttgctgaatatttatattcatcgttatatagttgtattgccttaattgatttattatacatctctaaggctttattctgtgttaagtatggatatttcaaattcaacaccctataggtcccaggagtaagccaaataccatgcacattcttatacagatattcaaaaagatctctagttataagatcaaaatatagaaatggattattatctatatagttagcatccaaataaaaattatatacaatactatctaaaagctctccaggtatatccatattatgagtttctttccaacaccgtaacatcctacataactttttcattgttaagttatgcgtcttatttctcgcattaaaatattctaattctaatctaggattcatagtcttccaagatccaccattattggtatcaggataataataggagttatcgtcaaacttaaatgtaggaataatttcaaattttataccatctgaaaaatcaataactataacctgcccatccgaagatatcttagatgttgaataagttttcttaagcttatcctttacctccgataataattgcgattgtatatttccatgtctaccatcaaatcttgtcttaactgtccatggcaactctacaactatatctatatcactggcatatattgctgttccacgaccataagagcctacatataaagaatgattagtctcagaactagaatcccagtactcttcatttattctttttgtgatagatttataccgtaatcgaaccttcgaaactacatctgtagtcatatatatactctcatgaaactctttaaaccatgtatttatccccatatttacacactttcatagatattaatcccagatattaattattattacaaaaatcattatataattttaacaattcagtaacacagtcctcttcagtcatcaaaatatcaaatccatatgcattcataacggctcgatcattagctctatgagcttctcttaactctttaggcatcaaaacggcatcataaaggtctgctaaagaacaatcaggatataactcacgtgcaacaagaattgcttgtgcagtttgttctatttttttcttttgactttcatttaacgttggccacggaaagttattatatacaataaagtttgaatatctataatcacttttcaaacgacctgcaacaactcgcatccaagccatatgaacatttgaatttaaaactccaaaagtatataaatctgcataaggcataaaatatccagcatcacttatcatgacagttgatgataagaatcccattggaatatatctacggcgctctgacgatacacgtggaataaaaataaaattatcataatctatattcttctgtgtaatatttaataataaagatggatattctgccccctttctagtacctgcatcagtcgattttcttctaaaattatatacgttactgattcgctcctttacgattttactctgattaatttctgcaggtgaaatatcctttagccaaataacatatcttgattttctattaataaattcataggcccctaaaaatggacgtatccaagatttaatgataggttccctcgcaataatttcatccttctcttcctcagataagattaaattcccatcatcatatgttttattacctaaaattaattcaggaacattacataaaggtttggttctacgcttcacaaaaatatctggtaattcagctagatacgcattaatatgagcacaaggtttacagctttgatcactatataataatttattctttaattcttcatagctaaacccgacaattacacaatgcacatgtgcttttaaatttgcctcactatcccatatgaaactcttataagcgaaatttataattattccttcttgcataagagattcccaaagaattggaacttgttccccctgagtaatcgagtttgttgatacaaatgcagaatgaatatttgtttccttcatatattctgcagactttttataccatgcagcaacataatctaaagacttagcactagaattttcattaaataatgataatacttccgccttttgctgtttattcatcatctttgcaccaacaaatggtggatttcccataatatatgataaagtattagacttaactatctcttcccaatccatattaagcgaattaccttcatgtatatttgcattattatgtaatggtaaaaaatccatttccttatgaataatagactctgtctctttaaacatttgtgcttcagctatccaaatagctgttttagccacagcgacagcaaaatcattaatttctataccataaaactgttgaatactaaccttaatagggttcaaatcctcttcatcaaagcctagtacccctgtccctgatgaatccgtaatagtctctcttaaaatatcattttctaatcgacgcaatgataaatatgcctctgttaagaagttaccagaacccgctgcaggatcaagaaatgttttagacgccattttatcttgcaaagcatttaatagttggattttcttttttccatcttttctagacatagcctctttaaaatcattcctaaactcatctaaaaatagcgggtctattaacttatgaatattttcaatactagtataatgcataccaccctgacgtctcttttcaggatttaacgtactctcaaatatagcaccaaagatagttggagaaatttcactccaatcaaaattacatgcatcttctaatattaaattaactgcatcgtctgaaaactgcggaatttcaacagggtcactaaaaagacttccgttcacataagggaatgctaataaagtctcactttcatatggatttcgattagcctcttctgtatctaaaatacggaataaatccatcagtgcatttcttacttgatggggttgaaagtcttgtaaataatcgtgaaataagcttttcttaccaaatagccccgagtcttctgcatataagcaaaatactaaacgtacacataacttgttaatattatgtaaaatggcttcttctgttaataaaggattgactttatattgagacaataaggaatcatatagtcgagcaacaagttcacctgcgccttttgaaatttccatctcacgttctatatgactacttttaacatcgactaaaaaattaagtctataaaattcagttcctaatttgctcaattctataatttccgcagaatcatttggccgttccatatctaatacatgaaactctttaaagttacaacttacaatccatcttgggcgttcactatatggtaatgcagcagcatagcgttttgcttgttctgcgggcgttaaaagtgtgccatcagattgtctaattggagcattaagatcttttcctaaacttttctgctctatcatagtatgtgtagccggaatcatagcatcaatgtaactagtatgacctaactgtacacgttgctcaaaaccaataaaatcagcaggattatttactccgtatacattttgaagtaattccatccaaaatcgttgagtgtcttgcttctcatctccaatattttcccattttttagcgaattctttagctgctttctcttgctgttttaatgtaagttgcattttatgcccccaaggtcccctatacatattggctattaatattagaaaatctaatttacatacttttatattatcataaaaataggattaatcaccattattcaccatggattctatactagcaaagatttcttcaaacataaaaaaataggcataagactaaacagccttatgcctacaatatttacaactggtgcgcctagagggaatcgaacccccaacctacagtttaggaaactggcgctctgtccggttgagctatagacgcatgtatactttattatatcgtttttaaatctatctacgcaagaactatgctataatacagctgttgatagtattagagagttcttataaaaaagaggtatatgtaatgaaactatgtaaacgatcgattatcaccagttcactattagcaatattaacgatatcatctgcgtatggggcttctcctgtgcagccaagtgaaagcacagatactgctgtggttgagatggattacgccaatattccagagttaagaaaatcaattgaaagcgcaacaccagccatagtacaatctacgcttgatgcttctgagggaaaacctactaacggtaaaccaatttattcgacagtcactatgtctggtaaccgtgttgtatccgtaaaaacttataaatctaaagaagaacaagaaaaggccatgttaaaggagcgtgaacgcttagacaaggtcactgcagaacgtcgcgctaaacggaaaaacgaaactcgtacagatatgctaaaaggtttaacgccaataccgttctatccacctgttagcgaaacacgggaattacaaagcgaaatgttctctcgaccatttggtaggcaactcgatttacgtttagtagaagcctatacgcaagattatgataaggccaaacctggcgatatttacgtctatgccgattatgtagactacacatctaagcaactattaggcgaaaaggatggtactaccgctatttcagctatgattttacgtacaatcatgagaaaagatgaaaacaaagctttcagcatcgatgtaaatgcgtacttcataaatccaacaacccataccatttccataagccgttctgacgatgtaaaaggcatcgatatcaagaaagacgaaagagctgaggctgtatttaaactaccttcacaccaattacaagctggcgacccacagtatgaaattgctaagcttatgtatcaagacttaacgaaccaaaaatttgattagcaatacttaaatacacgcttcatgacaaagttaattttccacctccaatctttggtaaaaaaactatagcaacaataagaaaaccccttcatagcaccaccatggctacgaaggggttctcatgttaattacgctgggcggctccaatcgacttgtacgtcaatagcaccccacatgcgtgtaagagctaatttaaagttttccaaggattctaaaggttttacttgtacccgttcatacgtatcgagacctgttgcattctcaatagtatgttcttcgtttaagtatgcacggaccttatcaatccattcttgttcaggtaaatctatcgttacgatttttgtatccgtatcgtaagataaaaccccgttgctatttacgccataatggatggccacacgaaatatactcatatttatacctctcttgcagatagtttcatacgtatacacatttctatacatgtacattgtatcatgaatgtttctattcttgaaagaattttattcttcagtatctaaatccatttcggcctttaattccgaccgttttcgccgttctccaccatcgccgtgagcacgacgccaaagggctccactcatgatggccccttcaccaaatttagatgccaacgagtctagcacggttgaaagcttctcatctttctcgcccgtttcaatggagaataaatcgtcctgtacaattccttccgttgaaagtccactaaccgtcacacctaaaagccgaattggtttgagcggcatatcgagaacggatgtatcaaattgaggtaatggtgcggcgcccatcatctcacgattctccgtaatcggtctatcattagcgttgtcagtgaaagtcttagcatcatggcgattcgattggctagtattgcgagcctcccgttgtctagtattactccgttcacgcatgagtttattccacaatagtacggatgtatcatagataatacgttcttggtccgtagcagaatctagtcgtttctgacgagatacggttttaaaatcattgtatcgcaccttaatcgacacggtatgacccatcaaaccatatttacgcaatcgtttggctacgcgattggcaaagtaatgaagttctaaatcgataacagcgggatcctcgacatcgctttcataggtctcctcattaccgacagactggatttgacgatccggttctacaggccgttcatcgatgcctcgtgccaattcccaaatacgccgtgcctgattgcccacataaggcactaacggtttctcatccgacaaggcctgcacatcctttatcaaggcaaaaccaccatctttaaggcgacgttccgtgctagggcctacaccccatatgcgttttatgggcaaattggcgaggctttcacattccttaccataaggaataaccacaagcccatcaggcttatctaggtcagacgccagtttagcaaggaatttattcggagccagacccgccgaaatgatgagccctgtttcttcaaacacgcggtccttaatagcacgacccaaagacttggggcctgtgaatttatgggtaatgcccgtaacatccaagaaggcttcatccagagataagggctcaatgataggtgtaaattcctccatcaccttgtggatgatctgagaaatctccttgtagcgagccatattcggatacacgtagataccgtgcggacaaagtttcttcgcccgcgaaatgggcatggccgaatggacaccaaattttcgagcctcataggatgcagtagctacgacgccacgcgaagaaaggccacccacaataacggggtggcctttatattcaggatgatccagttgttctacggatgcaaagaaagcatccatatcaacatgcataatccagcgtctcatgattacgcgtctttttcgtgttcatcaagacggcagtatttgatttgtgcgcaaatgcattcgtctttagttttgtacaattgtggaatgatttccaaaatgtcaccaaatgtatcttcattgatggaatagcgagtccaaagaccattacgttgagaatttacaacgccagcatcaattaagattttcatgtggtagctcaatgtggattgagataaattaaaacttgccaaaatatctgctgcacacaactcattacaggacaacatatctataatatgcaatcttgtttcatcactgagcgctttaaaaatcgttgccaaacgttcataggaaacttcaaccataagaaaaactcctcaatatacatcaaaaattatcaatctacttttatactattatatactatttttataactaaatctatttttttctttttattctcattaaaatattttaattgaataattaaatttatttatgagatagaaaatacgcataaaagcggagattctctaataagaatctccgcttattattttttataataattggctacagcagattaaaatacgttaacaagatcgattgtttggttacgattaggaccaacagatacgatacccaaaggcacgcctgttacttctgcaatacgttctacgtatttacgtgcattttcaggcaattcatcataagaacggatgccagaaatatctgtttcccaacctggcaatgtttcatatacaggttcgcatgcttcaagatttgtcaagctagcagggaagccttcaacgtttttgccgtttaatttataacctacacagattttcaattctttgaaagaatcaagaatatccaaacgtgtaatagctaaataatcaaggctgctaagacctgctgcgtattttacaaccataagatctaaccaaccagtacggcgaggacgacctgttacagtaccaaactcatgaccaagcgtacgaagttcttcaccaatttcattaagttgttctgtagggaatgggcctgcaccaacacgtgtagcgtaagctttcacaacgccgaaaatatttttcaaatagttaggacctacaccagcaccggtggaagcaccaccagcgattggatgggaggatgttacgaatgggtaagtaccatgatcaagatctagcatagttgcttgcgcgccttcgaacaatacctttttgtcctctttaatcgctttcaacacagcattatttgtatcagttacataaggtttcaaagcctctgcatatttaatgtaatctgctaagatttcatcgtaattaacaggttcagcatcgtatacctttgtaagcattttgtttttaaactcaacattgtacgccaatttttgtttgaaagtttccatgtcgtacaagtcgcaaatgcggatgccgatacggtttaccttatcagcatagcaagggccgataccgtttttagtagtaccgattttagcatcacctttggacgcttcttcggccatatcaagagcaatatggtaaggcatgatgacatgagcacggtcagaaatgtgaagggatttagcagatttaccttgtttttcaagaccttcaatttcttgtaacaacaccttaggatcaataacaacgcctgtaccaacgatattttgtttatcatcgtacaaaataccacttggcaataaacgaagcgcgaatgccttgtcatctactacaacagtgtgacctgcattattaccgccttggctgcgcactacaacatctgcacgttccgcaatccagtcaacgattttacctttaccctcgtcaccccattgagtgccgattaccatacttgttgccatatctatgtcctccaattgtgaaagtcaaattaatccatagttattatacaacataatagcaaagcacgaaaagactaaatgcagattacacgaactcaatctttaacttcttgccaaaggcatgagcaatctttcttaatgttttcaacgaggggttcccattcccattttcaattttacttatatctgattgcgtaatgcctgtaacttcagataattgagtttgcgtcatatgagcttcaatacgtgctttaactatattttcaataatctgatactcatcttctaactcatcccattcttttttaaatttaggattttttaattgctcagctaaatattgatctaatgtttccatattatgtgtacctttcaatataatcttgtttatacttcaacgccaattcaatcgcatttctaggggttttcatagacttttttacagttaccacaggtttcaagcaactttaaatccctaatcgttttagctcgctgtttttctgaaagttcgtttaaaaacagctttgctggttgctctccattaggtgtttcataaaaaattacagaaaatgattccatttaattcctcctatttactagaagaaatctttatcttaattatatgttaaaacatatattgggtaaagacataatcagctaaacaacattatattttcaacataatccactgcaaaccataagtcaatagatagggggtgaccattggtcaccccctatctattgacatttcatcctattaaattaataaattaaaataagcctagcatgtcccctaaaaattagaacacgcctgtactaattctaaaaacagggatatagggtcccctacaaattagaacaggcctgttctaattctaaaaacagagatataggggcccacctacaaattagaacaggcctgttctaattttaaagacgtatattatgcgtccccaagaattagcacaagcctgtactgtataacaattattttatttaggttctttcaaccagaagctcattaataatcctaacgcaccaacagggatcagtgtcatcaacgctgtttgtacatcgtaaatatctgctaaatgtccaatataaggtgctacgagtccacctaatgtaatgccaagccccaatgtaatgcctgatgcaaagcctgcatttttagcaaggtatttttggcctagaacagtaataggtccatattgtgagaatacgccaaaggccatcggtatcatggcgccaaagaatccccatgcattcggtacgaagataaacactaatacggatggtaaaaatataatattacctaaacgcactgtttttagaaagcctagcttatctgatagtgcaccacccatataggtgagaactgcgcccatcgcaaagtacatagtaagtgccaaactagatgcaccagcttcgccattgataacagtaatgtacaaaattggaataaaaatggataatacggagaacaaaattgatcgagaggcaatgacgaaaaatagctttgtaaaactcacccaatcgtttatacctgtatttgtgcccttaatttggctttcacattcacgcgcatcttcggcctcagtagtatgacctgtgaaagcatatagatatagcaacacgccgagcgcggcaatagccgtaaacacccagaggaattggccgccaaagacataaacaccaccagcaatgagcggccctaaggcaaaaccagcgctgccacccaccgcaaagcgccccatggcattgccaatctcgtgagattgtgtacgatttacaagaagagccgcctcaggatgaaatagcgcagcccctacgccggctaaaagagacaaagcaagaatcatttcatagttcgtagccagcgccatagcgctaatggacacaagagtcactgtaaagcctaccggaataaaccaaggtacgcgccatcgatccgctacataccccaaaatgggctgagcaatagacgctaccacggtattacagaaaataatggaagccgattgataataattgagattaaaattagcaataaaaaacggtatcaatgcagcgagagaaccttgaccgaaatcgttaatgcaatgaaagataggcggtgcgtattttcttatggtgcttttcatgtatcctccagatttgggtggtggtaccggcaaaaacactccaccggccgggtctgcttcgcccttttgggcttcgcagggccaaagtcatgtttttaccggtaccaccacctcccctatgtacgttaacaaataaaagcgccatatgaaaatacggcactcactgtaaataaaaaattcggcatagaacttatagagaaaaggacggataccttcctcaaaacgacttcgggtcccgctttagcgcgatagcgtgtcagctttttctcgtcccaatggctcatttcggcatagaatctatagtgaaaaaggacgggtacccttctcaaaacgactttgccctatttgctctatggctcgttttcggcatagaaggtttaatgcaaaaaggatggtccgttcagaaaacgacttcgggctccgcgtagcgcagtagcgtgtcggctttctggacggaccatcctatacattaaggattataggccgaaacgagccattattgtatctacgtgtttcaatagtttatatggatcgaagcatgcatcgatttcttcgtcggtcatgtattttttgatgttttcatcggattttagacctgtagcgaagtctttgccttcgagccaacgttccatagcgtgtttttgtacccagcggtatgcttcgtcacgtacagcgcctttgtctacgaggtgagtcaaaatggtttggctgaatacaaggccacctgtaagattaaggtttttaagcattgtttcagggtataccaacaatttatcgatggtacggattgttaagtgaagcatgtagttcaacgcgatggttgcatctggtaagataacgcgttctacagagctatgggagatgtcgcgttcatgccacaaagcttggtcttcgtacgcagattgagcataaccacgcaataaacgagccataccacaaattctttcacaagtgataggattacgtttatgaggcatcgcggaggaacctttttgtttagggctaaagtattcttccgcttcgcgcacttcggtgcgttgcaagtgacggatttccaaagcgattttatccaatgtaccgcctacaacagcaatggtggacaatagttcagcgtgacggtcacgttgtacgacttgggtcgcgattttaacaggttcaaggcctagtttttcacatacgtattgttctacgaatgggtcgatgttggagtatgtaccaacagcaccggacaatttaccaacagcaacgcttttacgagcatgttccatgcgttcgatatcgcgttctacctctgccatccaaaggcaaagttttaaaccgaatgtagtaggttcgccgtgaataccgtgagtacgaccaatcataggcgtatgtttgaattctgcagcgcgacgacgcaatacagcgtgtaattgtttcaaatcttcaatcaaaatatcgcaagattgtttcatcatatagccaagtgcagtatccttaacgtctgtggatgtcaagccaagatgaatgtatttagccgcttcagggcctacatattcgcccacagcagtcacaaaggaaatgatgtcatgatttgtttcacgttcgatttcgtgaattctttcaacatcaaaattgcccttttcccgaatgatttttgccgcttccttcggaatcacgccaagctcagcttgcgcttcagatgccaatgtttcaaccaataacattgtgtcgaactcgttgcgttcgctccaaatatggcccatttcttctcgtgtataacgtggtatcatgatgtctcctttgcatggtgaaagctagattttttatataataattgtaccatatgtaaaagcttggttcaataaatcttccgtaattttccgaataatatatatattagattttcttaatgttcggtattttattttgtatagattgttttgtgatttattattataatagtaatgtataaataagtgatatatcgtatcaacatactaataatacacatataggagtagatcatggcaaagaaacaacataaagaacgcatacaacaaccgaaggaatctcaaacagcaagcacgttgataaaattattttttctcatcagttttatcgtcctcggcgtcttcgtgtttaatgacatgcctatcaactggattttaggcgtatacgcagtggatattttagtatctcttatatatgtagtcatcaataaaggtcgcatcgctacatccaatgtggttcatacgaatgtgcgtcgcatcctagctttcttaattatgctcattactatgttcttttatgcctttgcactatggcgcgtggaccaatacacaacacaaatgcaagtgacattattcatcggtggcgtcatcatttactacgcaatctttaacagtacaaaagacttaattaagaaataaatttttagcaatatatttgattcgtatttacatcagatatctccatatcaatccctatcatacaaaggctcaacctaacatagctttgtatgatgggggttttttattcataaaacctcttgacgtttagtgtatgataaaagtaggtacagtagtaagtcgtaccaaatagttccaatcaggaggtccatatgaaagcttatgaaattttgaacaatccctttctaaataaaggtaccgcctttacaaaggaagaacgtaaaagccttggtctcgaaggtttattgccccccgttgtacaaacgttagaacagcaagcaactcaaacttatgaattatttagtcgcaaagattctctattacaaaaacgtgaattcttgatgcgtattttctccacaaatcgcactctattcttcaaagtatttagcgatcatgttgttgaaatgatgccaatcgtttatgatcctgtcatagctgaaagtatagaacgttttagccacgaatttattgatccagaatatgcagcctatattacagaagaaaatatagatcaacttgatactattttagatcgagctgcagatggtcgtgatattcgcttaattgtagttactgatgcagaagaaatcttggggattggcgattggggtactaacggcgtagatatttccgtaggcaaattaatggtctacactgccgcagcaggcgtaaatcctgaatgggtactaccagttgtacttgatgtaggtacaaatagacaagagcttcttgatgatccattatatctaggggttcgtaaaaaccgcatcacaggagatgcatacaacaaatttatagaaacttttgttcgtcacgtagaatctaaattccctaaattatacctacattgggaagattttggtcgcgaccatgctactgaaattttaaaagtatatcgtcctcaaattgctaccttcaatgatgatgtccaaggtactggtatcatttccctggcaggcatcttaggagcactcaaaattagcggtgacacattaactgataagaaatatgtgtgctttggcgcaggcacagcaggtgtaggtatcgctaacctcgtaatgtctgaaatggtagcgcaagggctatccgaagaagaagctagaagtcgtttctacctcgtagataaacaaggtctgctattcgatgacatgacagacttaacaatcgagcaaaaaccgttcgctcgcaaacgttctgaattcactaatgctaatgaattaactaatttatatgctgtcattaaagctgtacaaccaggcatcctcgttggtacatcgacagcaccaggcactttcacaaaagaggttgtccaagaaatggctagtcatgtggaaagaccgattattttcccattatctaacccgacaaaattagcagaagcaagtgcacaagatctattaacgtggacagatggaaaggcgctcatcgcaacaggcgtaccatactcacctatcgaacttaaaggtgtaacatatgatattggccaagctaacaatgcactcatttatccaggagtaggtcttggtgtattagcggtcaatgcaactcgcttaagtgatgctatgatttccgcagcagctcatgccttacaaggtattgtagatactacaaaaccaggtgcagctacgttaccaccagtagaaaaattaacacaattctctcgtacagtggctaaagctgttgccgaatgtgccatcaaagaaggcttagcacctgaacaagatattgatgcggcgattgatgccatcttgtggaaaccagaatacaaaaataatcaataacagtttattaacagctacataaacaacaaaaagaggcatatcttacatacaaccatgtatgtgaggtatgcctctttattgtcctagcacgacagggatggctaaggacacgacttgtccacgtttgttaacaatgctcccactcgtcttgatgatacgtatcgcttcgtctcgtacatcaggaggaacagagtcctctacgatacgcggggtattaacgccgacgattacattgccgctagcgtcaaagttaacgcgcacaacggcttcgccgcgtacagatgatgcttggccttgttctttcacttggcgcaaatattctgtaggattaatatccgattgttcgagccacgcccgttgacccggcgtcagcaaattgagtgcatccgcaaaaaacgataggtctttatctgtattatcgagaccattaccttctgcatcaggatccgtcgatacgtcattgcctactaatttcttttgttgttcctgtttttgatgtgtcacaacacctgtctcaccgccagtggcctcagattctatggcctttggaacagcccattcacgttttgtagccgatgctggttgttctgtatctatagttttctgtggttctacagtatttacaggctgtttcgtttcttgtttctgagctaccgacgcaggtgcatctgtaggcggttttgcctcctctggtggcggcgttaccgtcggatgatcctcggcttgttcgctttcaccagcatcggctaaatcaaagctaatctcagctgcctcttggcctgcaccagtgccactcatgccctttagtgaaagccccatgcccgttatcatgagaatactgatgcacagggatatcaaaaacggtcgaaaataatgcgattcaaacatagaatcacttccgatccgtagcgacactaatgtacttagcgccgtttactttcagcatatcgagaagggcgatgacctcgttataatacacgtccttagacgcgcgaataacaaaggcctgtcgtggcgtggtccgcacgatatcctgtacctcttgggacagattatccgcagaaatttcgcggttatcgatatagagtttatgcgatgtggtgagagtaatgataatcggttcaatggatttagccgtcgaagtcgatgtggatggtaaatttaacgggatttgttgctccgtattcatgtataaagtgccgaccatgaagaataccaatagaaaaaatacgatatcaatcatagggatgatcatgatggtcggttcttttttcactcctaatgtacgacgtctcataggtcatgttcctcgttgtacgcatcgagaatgctgccacattcatgttctaaggctacgataaaatcattcacctttgctgcacaatagctgtgaaaggcaagagcaatgatagccaccgtaaggcctgtagcagtagctaccaaggcttcggatacaccacctgtgatgatggttggagccccaatgtcaccacctacaacagcaaaagcgcggatcatgccaagaacggtaccgagcaagccaagcaacggcgccatggtaacgatcatgctaagccacccaaggccacgttttaagcgttcatcggtatagcctaccaagtcttgtaaacgattttctaaaccattgtaattttttgcactgcgcaatgcctttgcaaagagagtacctagattttgtgtatctcgttctaatacggttggcaacataatccagcctggatgattatttaggacagccgtgaattggcgcatgtccttacggaatttacggtatagaaaaaatcgctcaataccaatcattagggtaacaactagaaagataacgagtgggtacataacgaaaccaccagctacaaataaatgtgcaatgctactcatactaacctccaaaacccacactcttttaggctcttatctaataattataccacgtttttacacatcaaaacatatggggctcacgatagatgagtaaaaatatactagttgatgcatacaatctgacaatgatcttaactagtataaaaaaatacagaaaaagggctacatcaatagacatgctaattgatgtagcccttattagtgcaattttatgtacctttgtatgaattttttatatgtactatttatattgtgcacgctatgaagcgcaggctttcataaatggcacagaatcgattcgtacatagctagatattatttatcaagtttattaatatccaagcgattcatgctgccaatgaagcgattgtaagattcaatcatatcattgtaatgatcagctgattggtcacctaagaatgtacgaactctaccaatcgttgtatttaattgagacttagcagtgttatattctggactcgtaacggtgccagctacatccataatgccttgtaactcttggttagctgcatttacatcgatttgtttgccttcttcaaagccatctaataaagccgttaagcgtaaatgaacttcttgaacagcggctgcgtttttcttaccagaatctttaagttctttcaactgttcttgttgattttctgtgttgtgtttgtgaactactgcgtctaactgattatatgctgcatagaattgatcatataattgaacgtatttaggtcctaattgttgttccttagcataattatctgcttgatatgaattagtttggtagtacgtatccaattcactggctactggtacaatatcctttaatacagccaatacgttgtctaaaggttccttcatatcatcatatggtacgccagcgtctttagcagcttgcaacttttgttgtaaggtatcaaagtgtggtgccatgaagcttgttaaatgttgcccctcttttagtttttgaacggacggattgatagcatatccaaagcgtacggaccaactattaaaatcgccaatcgcttcgatatagttattgaacactttaatgtcctgttgcgatgccttttgagcgccttgttgcaccccattggcaatcttagaaaaactacagccactcatgaataatggggatgcaagagcagttacacacaatactgctgttgtcagtttttttgctaatggattcaaaataaatctctccttttaaaataacccataaagtatacatctataactaaattatatactaaatatgatttttacaaaagtcatacttatgcatttcatgaaaaaaaaggcatagtacctatcatttcctatcgattacaaaccgatagcagtatagatactatgcctgtatgtatagagattatgttaaggacttgtcaaagacacttattaattcttcaacggcttgcgattcgctcatttgtccgtctaagacagctgcttcaacttcgcccatacgaccttgaatgactatattattaaagaataggttgtgcaagtgttcgtcaatcatatcgcgtacccaacgaagggattgttcttgacggcgttttaagaatacgccattttctttaccttgttcagtaaactcttggataacatcccacaattcgtcgagaccatccttagtcactgcggaacaagtgtaggcttgggttttccatttttccgtagctggacggatgtaatgtagcatccgatcataatcgctacgagcgatgagagcacgcttgaggttgtccccatcagccttattgaccacaatagcatcagccagctccataacgccttttttgatgccttgcaattcatcgcctgcaccagttaagacgatgagcataaagaagtctaccatagaacgtacggtaacctcactttgcccaaccccaacggtttcgacaagaataatatcatatccagcagcctcgcaaagtagcatcgtttctctacttttacgagctacaccgcctagtgtaccaccagccggcgatggacggatatacgcctcaggatgtttcgtcaacgtttccatccgcgttttatcgcccaaaatactgccttttgtgacttggcttgtagggtctacagcaagtacggcaaccttgtaaccagcttcaatgagcatattaccaaaggcttcaataaatgtacttttaccggccccaggcacaccagtaataccgatgcgcaacgccttgcccgtacgaggcaatacggcttgcaatacttgttgagctagtttgaaatggtccttattattactttctactaatgtaatagcccgtgaaagtataacgcggtccccctgctcgataccgcgtacataatcagcgacagttaacttctttcgccgctgtacgggacgtaccgacggagccagatgagtggagctagacaagaggccgtcgtgcatttccttgacgcctttcatcacgtgacacgcaaaggtatcatcttttttcgcatcttctggcacccagtcgggacggtaggtactaccctcggcgcttgcgttttttacacctaattctggcgccttaccttcaccagtggtaaaagtagcgtcctgtgcattgcgcaattcatccggagtagaccgtttattatcagtcattgccttcctcttgaacgtggctagtcaatgtttctagtaattttttcgccgctactggcaaaactgtaccagggccaaagatagccactgcgccatgttcgcgtaggaactcatagtcctgagcagggattacgccgccgatggcaactaaaatatctccacgacctcgcttgttgagttcttctacaagttgaggtaacaatgttttgtgacctgccgcaagagaactaaatccgacgatgtgaacgtcattatccaccgcatcttgtgctgtttcttctggagtttggaacaacggtccgatatctacgtcaaagcccatatccgcgaaggatgtagcaataactttggcaccacggtcatgaccgtcttggcccatcttagcaatcatgatacgagggcgacgaccttcgagttcttcgaaatcatctgccatttgacgtacttctttgattacatcgtcatcttcatattcgctggagtatacaccggaaatagagcggataaccgctttatgacggccacaaactttttcaacagcaaaggaaatttcacccaaggatgcacgagcacgagctgcttcaagggcaagagcaagcaagttgccttccccagattctgtagcatttgtaatcgcttcgagacaggattgaaccttgtcttcatcacggttagcacgcaattgttcgagacgacggatttgcgcttcccgtacagctgtgttatctacgtcgaggatatctaatggatcttctttatctagacggtatttattgatgccgacgatagcttcacgaccagagtcgatacgagcttggcgacgagccgctgcttcttcaatacgcatcttaggaagacctgtgtcaatcgctttcgccataccgccaagggattcgatttcttggatatggccccaagcacgacgaatcaattcgtcagtcaatgcttctacatagtaggaaccgccccatgggtcgataaccttacataccttagtttcgtcttggatgtaaagctgagtattacgcgcaatacgagcagagaagtctgtaggcaatgcgatagcttcatcaagcgcattcgtatgtagggattgcgtatggcccaatgcggcgcccatcgcttccatacatgtacgagccacgttgttgaatggatcttgttctgtaagagaccaaccagatgtttggctatgtgtacgaagagccatagatttaggattttcagaaccgaagctcttaataatcttagcccacaacatacgagccgcacgcattttagccacttccataaagtagtttttgccaatagcccagaagaaggacaaacgaggtgcgaattggtcaacatgaaggcctgcattgacaccggtacggatgtattcaagaccatcggccaatgtataacctaattcgatatccgccgttgcacccgcttcttgcatatggtagccagaaatagagatactgttgaatttaggcatgttttgagatgtatacgcaaagatatcaccgatgatacgcatggacgtagctggagggtaaatataggtattacgtaccatgaactctttcaagatatcattttggattgtaccggccataacctttttatcaacaccttgttcttcaccagctaggatgtagaatgccataacaggcaatacggcgccgttcattgtcatggatacggacatttggtcaagagggataccggagaatagaatttccatatcgaggatagagtcaactgcaacgcccgctttaccaacgtcgcccactacgcgaggatggtcggagtcataaccacggtgagtagcaaggtcaaaggcaatagacaaacctttttggcctgctgccaagttacgacgatagaacgcattggattcttcggctgtagagaaaccagcgtactgacgcactgtccaaggacgagttacgtacattgtggaataaggtccacgcaagaatggaggtacaccagccatatagtcaaggtgtgtcatcccttcataatccatctctgtatagagaggttttaattggatttgctccattgtcgtgttatataagtcttcaaagctttttcctgtttcttttttaagttcagcaagccatgcatcgcgcgatgtggcagactgagatcccaagccaagagaggagaagtctggatttttaaacatgagctcacatccctttcttatcttgtaacgtatttaaaatagcgtagcagtttgcgcgaacagagatgaaatcatctacacctgcttcacgatatacaggctctaggtccttagaaggtgcccctgccaaaataaccgttacattcggcatagtttctttcaattctttcgcaagtggtggaaccaattcaggatacgtatcatctgtagaacagataactaccacatcggcgccactttcacgagctgctttagccgcatcagccgttgtttcatgaccatcatttttgattacttcgaatgccgctacttcaaagaagcctgtggagaagtccgcacgaggtttatgttgaggaatagggcccatattagccaagaataccttcacattatcttttgtgcgttgtttataattttccgtacgcatacgaagggcttcaaattgttccgtccagcgatgtgcagtaattggttcgatagtttcagaggaaatatcgcccgcctctaaagcactgcgaatttggcgaattgtcattttgtgtaatgcacccaattcgataaggccaatcaacgcacctggttctgttgtgcttgcttctaacgtagcttgtgcttttacaagagcatcttgatctgcaccagccaagtattcttcaagatgagctacacgtttttgacgtaatgtttcttgattttcaggttttggatccaacaattcttccgtcatgttagcgtacatgttattaccaaccgctacatccttacggaatgcaaggtttttaaaacgttcattaagaattgttttaacttgcgcttgaggataaccttccttcaaggcagcgataatgccacctttagactcgatagtttggaattcatcccaaattttttcgcatagttcagctgccaatgtttctacataccaagaaccacctacagggtcaactggttgacgcaattcgaattcagtttgcaacatgacttgaatgttacgggcaatacgacgagagaattcatcggatttgcgaattggttgatcaaatggagaaacttcaaggctattgagaccacctacaacaccagagaatgcttgtgttgtattacgcaacaagtttacatatgggtcgtatacggtttttgtgaaagccgatgttctgccgtgtacatgaacggcacggtcgctttcaccagcaccgaaggcctccataatgcgagcccaaagcacgcgcaacgcacgcaatttagcaatttccatgaagaagtttgcacccagggagaatgtaaacatcatgctcttagcaatggtatgaatatcgatgttgcgttgtgccaattgccgcacgtagcaaacagctgttgccaatgcataggcaacctcttgcacatcgttagcaccgccattagcgtatacatcaccggatacgagcactgttttaagctcaggtgcttgctccttggcccatacaacagcatgtgccatttcatcaaaagcagtatctaaagacatatgcaatgcaccgtctttagcccacacgccgataggatctgcaccaacgagacctttcaaatcggatgtttgctttttagaagctttcacagtagccgacaacataccgagcaaaatcgctgcagatgcgccagtttcaatgtataaaggattttccttaagattaaatcgttcaattaattggctgcaatcggccatcgtatacaaggatgtgccacctacaccaacagatgcgcctacttgcacatcttggtcatggcgtgttgcttcatcaagacgaatgttgtgaatagtgccacctttcacaatttcgtataaacttgcatgattggcatccttcggtaaggattcatcaacatattgagatacaccccaagaatcttttatatagccgcttgctttcgtgccacgtaggaactcgccagcgccaggataaacgccctttggaatcttttcctgatgcaatgcaggtgtatagataggttgtaacgtaataccttcataggttttggtgaacatttttttattgaaatcgccaccttttaacgccttttcaacctcagcctgccatcgttcatacgtaggtttctcaaactcatcaaaggatacaggcgccagtaaatcgcgttcagtgtcctttgaagtctttttgtcagacatatatgtgcctccttttcaacttgaaaccatacagggggaacagcgcaccgtaccagtgagttgctttgtatatgagttccataggtgccaaatatatgtccatcatgatgatgaatctccagtcaaactattaagcctatgccatatatgaacgaccctctagcgtggcaataaaaaaacgtgccacccgagagtgacacgtaaggttacatattgaagggtacactaaaaatactgtagccaaagactgtagccagcatacctcaatccccttcctatcgctcgtaggtacataacggtgattatcaaataggcagttctcctggcttgggctcaacaccttgctttcgccttcccagattgctccagtgacatgtatgaaagcaggctcgtccttacagtggcgggaccgcatcggcttgtaccgatttctctattaagtcttgcgacacctattctctatattcgttgttctaagtccaatatagtgtaaaaatatgcacaaagtcaatgaacataacagttaatcataagtagcaaatttaaagttataactaacgcatatatagaatgataaaaatgcataggtacaatttagagaaattacctctataattcgctaccgctatactaccaccatgttataataattctactagtgggaggtcgtattatgaacgaaataaacaaaaaaggtctcagcactacattgttgtgctgtttaatttggggtttgctgcccctctattgggcgcttttaaaccaagtatcatccttttccgtattatcgcatcgcatcatctggtccggattttggatgttcttcctcgtcatcgccacagggcgccaacaactgcgtatggacatacaaattttacgcacccatcttacgcaattaggcctactattactggctgctatacttattagcatcaactggttcacctacatttgggccgtaacaaatcagcacgtactcgacacgagtttggggtattacatcaatcccttactcaacgtattgctcggtattttaatttacaaagaatccttgctgtggccacaaaagctaagtatcgccattgcaatcttgggcgtggctatcatgactgttcaactaggtacattacccattgtctctatcgtcctagccgtatcctttagcctctacggcgccgttaagaaacgactcaccatccatccattttcgagcatcgccttcgaggcatggctcatcacaccgatagcattatggtatttaacggctatagacaccacctcgtggacctttatcgaaaacctaacgccgaccggtctcctcctcatcggcgctggccttaccacatcgattccactcatcctcttttcatacggtgcccgcctattgccactaaatatactcggctttttacaatacctatctcctaccatgggcttcttcttggccatcttctactttggtgaaagctttggtacagcacaactcatagccttcggctgcatctgggtggcactcgtattgttcaccctatctaatcaaatgacgacacgtattaagataaaaaaatagaatacattacaaaaaagctgtagcaaatgaaattctcatttaatacagctttttatgtgttcgtttcacacgagtctaatgtaatataaactcagatcttattaatctaattcattcatatttgtcgtattcatattagaaatataatggttataagcctcaatcatacgagtatagtccttatcttgtttcgaacccatataagtccggatagcaccgattgtagagtttacagaggtcttaacagtgtcatagttagagctagtaatgccattagataaatcaccaatagcttgtaactcttgattcatggcattcacatccggttgtttttcactatctaacttttcaagaacagcggtaagtctcaaatgaacctcttgtgctgcggctgcatttttcttacctgcatcgcgcaattcttgtaacctttgttgtaatcgatcgaggttgattttatgcatcagattatcaaaatctgcatagataggcacaaattgctcatacaactgtacatattttggacctaattgctgttccttagcatagttatctgtggtgtatcctttagatttatagtatgcatccagttcttccgctaccggtctgatttcattcaattttgaaagcaacttatctaggggctccttcatttcatcataaggaataccgacttgcttagcttcttctaattctttttgtaactgtttaaagttcggtgtattaaatacagttaaatgcttacctgcttttaaatcattaatcgtcggtgtattcgcataatcaaacataacagccatgcgattatatcggcttatggctttcacatattgattaaataattgtacctgattctgttccgaccgctgtgcaatctccttgcggctctgctcagtcccttgccatagttctgacatactacaaccgctcaaaaacaaaggtgatgtcagcgttagtgcacacaacacagccattgccatccttttgccaagtggtttcatgatgaattctctcctttcatcaatatacagcttagtttatatattctaattatatacctagtataaataataagaaataactcctaacaatggttttatacgtgtacagatacaacctatcctacattagtgcaaacagatattgatttagctaaaaatagtaaatccgtaaagaaaaccttaaccattcctgcgtggcttaacgatagagccctagcaaaagggattaatttttctcagcttttacaagaaacattggtggagaaaacaatgtaaattcacatcattaattgctcagcaaaattaggagtactgtccacgcaataactgctaaggtgagtaatatgatacaaagcgtccacagaattattacgaaatagagcattaattttagcacatataatacatcaaaccatatactatgacgatcctctaatcgcgccatatattcggagagatggcgcaccaaaaatggagctttcgcattaggattcagcttcttccagtacagcataatatacggcgttacaaaacaacctacaaacactaagtatgtaaggaatagaggtgtttctatattatgttgtgacataaaccctgaccagtccatgaccattagaccaccaaggtatagaaaaacaaaccaatatataaatcctaccacttttaaaataaggcgaatcatctgtttactatccattgtgacaatcccattactatcaataatctagtcttttcgagttttataagactataatcctactaatgttttaaatcgcgcattattgtgaaaccgttcaaaatgatcttgttcagcaccaacagcctttacagaaggatcaattttgattgctttttcaagccaatcaagggccttagtatcatccccttggtctgcataaatggtagcaataccatacacagaccaagtattactagggtccttttctaataccttttcgaaccatcgtttagactcttgtaattgaccttgtaacttatagaccatggccatattgtagtaattagccacattattaggatctaaatcataagctttcttcgtatcgaccaagcctttagtggtatcgccattgagcgctgttgcaaagccgcgtatagaataagcttcagcattattggcattagccttaatagctattgttgattcttctatcgccttattataatcaccagatgatagagcttgtttggcgacattcaaacgactattagcttctgtagtttcattcttctgtatttcttgtgattccactgtagttttagttgctttttcttgattatttacaagtaatgagcaacctacattaaacactattaacatagctataaatggtaatataaataaatgcttcatatatctatcctacttaataattcatataaacaatcattagtttgagcataagagatttccttagcatataaaaatcgcttttgataattagaccatagattttcttgataattcgattgtgctaagttatttaaagtttgtttccaatctacaatacgttctatcgtacctcgtttttcagcagttctatagattgcttgagataatataatataatcaatcatatcaccattaagttgagtaagtacaaatacatcatatctatcacgaggtcgagttgaaagctcaccacgactaagaatggtttcaattttttcagctaaaattgtctctaaattatatgaccaaatatctatttgctttccatcaaatacagatagaacctgatatttaatttgtctaggtgtaatagcatcatccgttgtaatatctataaatacatactcttgtaaatgttcatatgaagcagatattttcaaacgaacaccaccatatttatccgctccacgaatcggctcaccagattcaacatgaaataaaaaagcactttctgataatactacaatttcattaaatacggatataagagtatcaatatttaatgtgatacccttcagcgtaacatctaaatccatagttgtacgcttatcaaggcctataatttgaccaattaaatacccgcccttcaaaataaaggagtccttataattacttactgcaatagctttcagtatctcttcaagtaagtattgctgttgtacttgttgtgctgggactccttttttcttagcaatatctttcattttacttttaaaactgttagcattagcaaacttcatgttaacacctctatataggattgtaatttactagtcactttaaacaattttccataataatataactcatctagattatattttttatctttaaaatacatttgaaatgctgtcgatataagctgtatatctattttatatatagggcgtaaacattctgctagtgtacgctctcttgaataaagagaaataaactgtttaggctgacgctctaactgttcaattcctttatcataatgagcacgcaaaacaataggtaaaatattattcagttttaacttctttgtatttgtaccataaggaaagctgagggttggctgaaatggaacagttaaggataacccatgtaaccataatgcagaatctaagctaaatattcctttaggaaatctatgttgaatgcaaaaccactcatctacatatacgtttggcagagaatataaaccacgttcatcagaatagatttcttcatttgctaacatcaagtttaacgtataataagaaagacctaattgtttgacttgattaaagtttaataaaccttcattatcttcaaaagcatcataaataagactctttttgatatccaatatccccacctcctatgttcagactaaacaaaaataccaacccaaagttttaaaactactatatacaaaacaaagtgctaacatcttactatgatgttagcactttgtcttaatttagtctattagattttctagtacaattattttttagccttagagcaacgatccaacaagtacgcaacgcttacgaatgggatgccgccgctttcaccaagaccaatttcacaggtagaactagagcttacgccaagtgtagcaccgtattcggcaacttcactagcaaggtcttttgtagcacatttattaagttctggtgtaaagaaacctttttgaccagcaaagccatcgcatgcgaaggatttaatattgaatacatggtcagagcatagatgtgccaagtcttcgatgtattgagatttacccaatactttgattttacattgtttatgaacaagaacgcgttcatcgcattttgtaatgtcaagacgagatactacgaatttgcataagaattcagaaatatcattgatttctaaatctggcatatgtttgaacgcatggttaaagcatgcactatggtcgataacgattggatatttaccattttgagatgctttcatcaacgcatcgtgtaaatcttttacagcacgttcatgtacgtcatcgtagttttcaaagctcaatccgcagcagaggttttcgatatgttcaggatagataatatcgatttgagccttattgcagaggctttcaacaacttgttgcaagctgcgttgatcatcataaccttggttttgacggaacgcacggttcgcacaagtactgaagtatacaaccttttcaaagttagtaggtttaatgcggtttttcaatttatagcgattagccttaggtgttgttttaggtacataaggtgttacgccagttacgccatgtaaaccttcagtgattttggaaattgctttttgtgtgataatagcaccagcaataccttcaaggcttacgccggcacggcacatttcaagagtactggagaagttgtcgtaaattttcttagccaaaccaggtgctggaggattgatgcggcgcatggataatgcgatttgtgcagtatcgatgctaagtgggcaaagacctttacacatggagcatgcagcacaagtttcaacgccgaaatattcataacctttttttagttcgtttgcaacagcgaaattgccttcattttcaaggcgtttagtttcgcgcaacaatgcgatacgttggcgtggcgtcaatgtcaaattacggctagggcagttcttttcacagaaaccgcattccatacagattgtgaaagcatcatcgataacacattgtgctttaagatttttcttgtacacatctggatcgtcagtaatcataacatcagggttcaagatgcgagtagggtcaaagatagctttgatacgacggttgatttcgtacgctttgcggccccattccatttcgatgaaaggtgccaccatacggcctgtaccatgttcggctttcaaagaaccaccaaaaccagatacgcgttcggacatttcttttaccaaatcaccgaagttcttagtatctttagggtcactgaaatcaggagtaatgttaaagtgaacgttaccggacaacgcatgaccgaagattacaccaccatcaacgaaatcgtatttgtggaataattcagtaagcatttcgatgcccttagtgaagtcttcaatttggaagcaaacgtcttctgtgataacagtagtaccttttctacgttgaccaccaacgattggcaagatacctttacggattgcccaccaggaatcgtattctttaggatcttgagaataaagacttggaatagctgttgggatatctttcaattgttctttaatgaaagctaagttttcatctacagtttctttggaatagctttcagtttggaacaagatagcacttgtaccttctggaacttcacgaacgaagtcaggtacattttctagagtttgaactgcttttaaggattgatagtccatcatttcagcagcaacaaccttttcacggcccatattagccaaggctacaacggcaagagatgcgtcgttcaatgtgctgaagaacatgagaccgcaacctttgtgaggtacatcttcaacagtgttgtacacgatttcagatacaaagcccaatgtaccttcggaaccgatgaacaagtgattgataatatcgatgatatcttcaaaatctacaagggagttcaaaccgtaacctgtagtatttttgattttatatttgtgatgaatcaaatgagtcaactcttcatcagccaagatttctttgcgcaattgcaaaatatcttcaaccatttgtggtttttctttgaggaattgatcgatgctctttttatcggatgtatccaaaatggaaccatctaataagacaacgcgaatagagcgaattgttttataagagttttgtgcagtaccacagcacataccggaggagttattgttcaaaataccgcctaccaatgctgttgcaagcgttgcagggtctggaccgattttacgattatatggtttcaacaaatcattcgcatcggaaccgataacaccacattcacaacgcaatgctttgccatcgtcgataacttccatttttttgaagccatcattacaaacgataagcacgtcttcactggaacattgaccagacaaagaagagccagccgcacggaatgtaaatggtgtgccacattgttgacacaaacgaataagacgacgtacttcggattcgttttctgcttttaccactacttttggtaaataactgtaacaagatgcatctacaccatacgcataacggcgcagacggtctgtataaacacgatccttacaaatcgcttgcgcctctttggcaaaacgatcataatctttaactaatatactcacttgaaaagcctccaatcctatccttaggaaaatttcttttataactagtatacgccgttctcatttcggtcgctaccattatgcataaattgtatatgaaatataaattctatagatacataatataaaatgcaccttagttgaaagttgatttcatttaccagaaaaacaagtgcatttcctaggaacacacatcaataaaaatatatgataaccacttatgaaagcccataagggtatcccctatcaatatgtgtattcataaggattaagaggtatgtagcatgaatacagatctacaccaatatgtgaatatttatgtggattttcctagtatcctgtatattacacattaggaattatcaatataaattagttatgcgttttaggaatagatccactgtttgctcgatttttaatagtaatctattattatcacgcctcaatatttgtaaaacatataaagacttttgcttgattttgttttacaaattgatataatatttgtaaaaagaggtaataattatggctacaactaatatcaatatacgagttgacgaattgttaaaaaaagatgccgaagcattgtttaatgacttaggcctcagcatgtcatctgctatcactatgttcttaaaatctgcattaaatcatgatggtatcccattcgaagtaaaacgtgcaaaaccaaatacagaaacaatacaagccttagcagaatatgaaactatgaaagctcatccggaaaaatacaaacggtatagtagttttgcagaattacttaaggatgttgaaaatgaaacttaagattgttgcatcaaatactttcaaaaaagatttaaaatctgctaaaaaacgaggtttaaaactcgacaaattacaagctattgtagataaactcgctgctgagattcccttagaacaaaagcatcgtgatcacgcacttacgggaaactataaagattttcgagaatgccatatagaaccagattggctattaatttatcgaaaagatacagatgtacttgaattatttctattccgaactggaacacatgcagatttattttaaacaacatatatggctatgaaaaacagaaaaaaggctgtaacaaaaatgtggtaaaactatttttgttacagcccttttatatatttttcttatgtttagactatataggtactcttgtaaattagaacaggcgtgttctagttgtaaaagtatcacatttaggtgctcttataaattagtacaggcgtgttctatttgtaaaagcatcatatttaagtgctcttataaattagaacaggcgtgttctaattctaaaagcctcacatataggcctccatataaattagaacaggcctgtactaattttaaaaagcaatgtatatgaatatctatcctacttaaaacaatatcccagagctaataatcaatttaatagccaatgcaaatacgccgatgctcataagtgccaagatagccttagctctgaggcgttttgctatttgagcgcctgcttgggccccaaatatggcaccgatactggcagggatagcaatgttaaatacgatatggttttctacaaaatgggtaataacaccaactgacgtggatacggccaaaatagcatgacttgtagcggttgctaaatgtgttggaaaacccatgatgtaaatcagagcaggcacgtgtactagcccaccgccgataccgaaaatactagagataaagccaacaataatactaatgccaataccgactggtttattgtacgtcacctgatcttttgttaaagattcttccttccgttcttcttttttaccaaagttcttaaagccaattagaaatgaggcacatagcataaagcaaccaaaggcaaatttaaatcccggtccagaaaattcatcagacatttgagcccctataatagcccctggaaatgtggctacactaaagattagcgcggcactaatatatatctttttctgtttaagatatgccagtgatcctgaaatagcattacacataacagaaaacagcgatgtgccaacaatcatggatggagaccactctgggaaccagtacataaacaaaggtacaaatacgataccaccgccggcaccaataatagtacctaacatagcggtaaaaaatccgactacgataaaaaacagatagaataaaactatattatcaaccatactgacacccctacgctaccacacaaacaacacctagttattcaaacatgataaatttattcaacaatcacggtagagccattaggaatgatggtaatcgatgcatcctcgcccataatgccacgggcgatgcacaatgcttcatctaatgtggacgcaggcgtcatgtgcatatcgcgaatgacttgatggtcgcaatcttgagtcacaacgataaccttatagtgattcaaaatacgcgctaaaatttgaattttccattggtatggtttagtttcattgcgaggtacgccgtgaatatcattcaagatttgttgaggactttccatgtttttgaaagcctcatataaagcttgtcctccatgtccttctttacaggaagcagcgatgatgataataccgccatccttacaagatgcttcgccagcagtcatgccctttacggattgatagagattttggtcagatggataaccgccattacttgtgataacgatatctgcaggaatagctttcacagaggacaaggaacgaataaactcatagccttccttatgggcatctacacaatcacccgctacagccttgatgatttcctttttgctatcgatgataacatttaggatgaactgcaaattcgcttttcgtgcggcgtacaacatatccttatggattggattttcatcgattttaccggttcgggaatgctcgctttcaataaattcagcacaatgattagccaacaccgtcaccttggaggcaacgccaggcaacacggatttgcggccgcccgagaagcccgcaaagaaatgaggattaattagcccctcggagatgagcaattccgtttctaccgccaaacgattgatgacgcacttgccgccagatggcaacgtgccgatttccaccatattctcagcatcctcagagtcatgattgatcagtttttcgttattcacgatatcctcgccgaaccgatgcaccatctcatcgtgcgtcatggcccggtgaaagccagtagcaatcagaatcgtaatatcaattgtcggattcaccgcgcgaatacgacggagcaaaataggcaacgtcaccttacttggcatagggcgcgtatggtcactcgtaatgataaccatattgcgttttcccttaacaaattcttcaagaggcagactgttaatcggatgatcaagagcctcctctacaagctcagcgggactcttctcagccttatacgccgccgcattagacacaagaaccccctgcacaaaccgctcatcaatagacacatctacacttttataatcatacggaaaagaatacgtcttcatatcgacacctcctattatatatagtaagtataacagaaatactaaagggagataagagtaagggtgtgctaaaagctccaccggccgggtctgactacgcccttcgggctccgcagggccaaagtcacttttagcacccccttacacttctccacaataaaacagagaaaacatatttccaatctataattgaagaaataaaaaaggtgagatgcctcgaaaaaacgacttcgggtcccttcctctactgtctgtaataatgcagctaaatcctatttccaatctatgttagatttaagacgaaaacgcgaggtccctctgaagaaatcgactttggccctgcgaaggccgcaggccgaagtcagacccggccggtggagatttctttagagggacctcgcgtcccaaacgtatttaaaactaattagattggaaataagatttagctgcttttaatcgtcctcgttcgcacgatacttgtagttcatcgcccggttgtagttttacatcgtttagaggcacgatgtatgttccattccggcgaatgctaacgattaaagtcccctctggcaagttgaggtcttgcaattgtgtatcaacataggatgccactacaggcaccttggtttggaaaaaggtttgcacattttctaggttgctttgaccggtcatagcttgtaataaggaatcgtaaataggtggttcttttaagagttctgccaccaagtaggccacgatggtaacaataccgatggcatagatattggaaaagctatttgtcatttcaagaacgagcagaatagctaaaattggtgtccgcatagcggctgctagcataccgcccatggcacagataacgaattgcggcacataatcaggagatattaaccctgccgatgaaagcaggctttcacaaaaggcaccggccgacgcaccgatgacgagcattggcaaaaagatgccgccttgagcgccactgccatagcaaaacgtagtgagcaagattttacccagcacaataccaccgagaagcaatacaccatgagattgaaaggctagctgccctactaaatcattgccaccgcccaataaaagctgggaatcaaagccgataacggccacagtcacaaaagtaatcacaagttttaagaatcgagagcatttcatccactcgaagaaacgcttaaaggcaaatatcatgcggcaaaacaatacaccgcagagccccattaaaatacctacaccgagcaaaaccggaaaataatcaagcggcatccctgaagttacggaaaatccgagggccggcgtaaggccaaagatagttaccgtaatatagttcgatatgagcgtagccacgaaggtaggaatgacgaggtacggataaaagcttttgtgcacctcttcaaaaacgaacatggcgccggatacaggtgcgctaaaggcagcggtcagaccagctccagctccagcggaggtaagaatccgctgttcacgcaatccagagttcatccaataggacacgattttaccggcagagccgccgatttgcaccgctggcccttcacggcccacagaaaaccctgcaaagcccgtgagtacgccgccaatcatcttggaaatgagcgtacggtacggcttcatgtcgaataaaccgagcatttccccttcaatttgagggataccggaaccgccagataatggcgcccacgttaaaaggcgatcaacaatacaggcaaatacgaccatagcaataagccagccaatagcccattccaaggaaatatcgcccattagatgccacctgatatgctcagactcgaggattaaatatcgataggcagcgccaaaaaatcctgcaatgatacctactaaggcccctttagcaatgagttcagatagtagtatccggttcatcgacatatctgccaaggtagagctgcgtttatttagtttccatagtttcatgcattctcctcctcgtggaaaatatatcgaatatcagtctaatctatgtaggattctctaaatggacggcaataacgatttctctgtcatccgttctaaacgaagtttctccgctacatacgtatcagtatatttataactagtatactttccgtttcctactttttcaagaattcccttattgaataacttcataatgagccgatacgcctgcggtttagaaatacctagtgcatttgccacgtctgtacgcgtcacttgattaacagcattgagcaacgaatggaaggctttaatatatggatttccataagtcggcgtaacatcatatacttgtgaggttccatgtaatcgatatacataatcagcagtattcaaataatacaactgcttaccatccatatcgaccgattggataatattcatctttaataattgtttaacattcatttcacaaatagcaggagataactgacaatcacggataatatcgtctatattagattgtttgagtttacgtatactatacaaaaccattaaccctcttaagctaagctccatattggacttgacctgattttgtacgattaaggtaacaaaattatcatctacgggtgccttatcaaaaacaacgcgcacataagtactagtagactcgtcatatcgaggtatcggacgccctgcaaatagtgatggttcaataattttatccacaccgcgccccgtcttttcagccaatccgattcgtttgaaagcatcggctaatacggtattacgactacgaggttctacaaacaatacggaattgggtgtaatcccttgcataaaatcgccaggactcgtgattgatatttgctcatcgttaatttcaacacgaatgcgacccatttctgtgtaatccctatgagaataagcatttactaatgcctctctaaaagaaatagggtctatatccatcaatcgaacagcaaccggaccaggaaatagctccgtcatcatattgactaaatctaacgattcaatacagcgctcaatggcctgcagtgcagggatatgctctgatacattcctacttaatttagtgcctttcatcatggtgaaagcagactctgcagtcggtattaaatccctgattcgctcgcctttacctagtagtatcaatccagccattgttggatgaacggtatcatctacggtttgtactaattgtaagacttgagctaattttaaattatccagctcaagtagcgactgatctcctctatacttagaaatcatggagcgcattctttcaaactcaaacaaggacaaatcatcaaatgtcgcatctaacaccggataggccgacacatctagaccataggcatttaccatataacgccgaatatcacgtaaaaacatcgggtaattttctggcgtgccatccccttttaaccgtcgttgtaatgcccgtccactcgacgtataaatcaactcataactctttggaaccgcaatactaataataggttttgtaaaactatacataatatctgtactaacagaaacattaggtaccgtacgattaaaaatcatagcacttaaccccgctgtagactggtggtttttatgcacgcccgtaatcgtcccatcatcctctacgccaatatataatgtaccaccctctgtatttgccaatgctacaacggcctcaactattgtttcttctgaaagtttcttaacatcacttttaaattccgttcgcaaatcttcaatcaaccctatattttctgtattctttgtatgcccagtatgcttcattttcacacctcctgacctctttcctgacctctttactcacactatatccttatatttacataatgtaaatatcttactcacgaattcgtgagtaaaaaaagaacagcatctatatgagtaatgattcatcatatagatgctgtacaagattgttattgattacacttaattagaatatagattcataaatagcaatgatttcatcaatggttacatctcgtggattacctggcgtacatgcgtcgttgaaagcagattctgcgaggaatggaatatcttcgcgttttacgccagcttcgctgagggatttaggaatgcctacatcatcggctagtttttggataacgtcgatggcagcctgacggtaggtgctttcatccatagcatccacattaggcacgcccataacgcgtgcaatttcacggtatttagcacctgtttcaggggcgttgaatttcaatactgctgttaataacatagcacaagccttaccatgagggatgtcgtacacagcactcaatggatgggccatagagtgaacgatgccaaggcctacgttagagaaacccatgcccgcaatatattggcctacggacatcgcttcgcgacctgcatattcgccagccactgcgctgcgcaaggaacggccgatgatttcgatagctttcaaatgaagcatatctgttaattcccaagcacctttcgtgatatacccttctacggcatgaacgagggcatccatccccgtagaagcacataggccagttggcatagacgcggacatatcaggatcgatgatggctatgattggaatatcatgagggtcaacgcagacgaatttacggttcttttctacgtcagtaataacgtagttgatggtaacctctgctgccgtaccggatgtagtagacacagcgataatcggcaagcatggatgtttcgtaggcgccaaaccttcaaggctacgcacatcgctaaattcaggattcgtcataatcgtagcgatagccttactcgtgtcgatagcactgccaccgcctacagcaacaatcacatcagcaccagccgccttacaagcagccacaccagatgttacattttcaatggttgggttcggcttaatattgtcatagatatcgtaatcaatgcctgccgcatcaagtaaatccgtaaccttcgtagcaaccttaaactcaaataaatcaggcgtagatgtaacgagaacctttttaaaatggcgattcttaatttcgtttacaatctcctgaatcgcaccttgcccaaaatacgacgtgccgttcaacataattctccgggacatatacttcactcctaacgaataaaaaataaaccgatagagaataactatacttagtaattctctatcggtatcaaaaagtcctgtatgaggggataaatacgttgttatgaatacactatatactatggattaacctagtatttataaaccatggctcatcttcataagcaatatacgtttcaccgattcatcaagacgttccttaggaatagtgccatctttaacggctttcataaggccattataggcctcttgcatatgttcatattcatggcatacgagtaaaatgtcactgccagcttggatggattgaacagccatatcgccgaaggtatagtgtttggcaagggcgcccatgtccatatcatcggtaacgacgacgccgttatagcccatatctttacgaagccaatcagtgatgattttcttggataagctagacggatgatcagggtcgatttgtggatacatcgcatgggataccataatcatatacgtattcggtttcgactgtttaataaggtctacaaatacctttgtatcctcagcgagtaacgtatctttagacacaggcaccacgctagtgtctgcatgtaaatctacatcggttttaccaatgccagggaaatgcttgtacgaataccataggccagattcatcataagctttgcctaccgcacctgcaaacttcacgacttggtcgggattcgtactatatgagcgaccataggttaatcccaagtccgcatcaggcgcaaaattaatattaaatccaaggtccttaagttcagtccctacttgtttggctagatttgctgcatggtcaacagaaccttgactcagctcttctgcagggggcaccttaatcaacttgtcctccatacgcgccacggcgccgccctcttggtcgataccgatgaacaatggcgtaagtcccgcacttttaccggccttattaatatcggtaatgagcgttttcacctgctccttactctccatgttgcggtcgaacaggataatgccacccactcgatattcattgagcataaatttcgcatcatcattcaaggttgtgccatgaataccaatcatcaacagctggcctaccttgtctgcatcggacatattagccacaagcttatctaccttttcttctggtgaaagctcactctgcaccaccgcttcataggttacaggctctgccttcttgacaaagggattatgaaatgcgcaacctgatgtgagtgccaaagcaccaatcatagtcgctgctacaatacgtcgtaacatattaacctccaagtataatttataatgcttatagtatatcatcttcgaccatgttatatgtacttaacaaaacaaccttttctatgctatactaaactatatcgtaaagtttcgatgtaatttagtatataatgactcctgtgagtcaaagaggaatatatggaatttgaaaataaccaagtaccagaggcaattctggacaaattaacaaaggtgtgtacatgccgtagcattacacgcaaaacgattaaagaggccatttttaatggggctcatacattttcagctgtcaaagaagcgactagagcaggcactggtgcctgtggtggcaaaggctgtggtccgcgcatcgtaaaattactagcagaactaaaagaacaaggacgcatttaacattatcccttgtttaaaaatagaacaggcctgttctattttacagaaccatatataggtctctttagaattagtacaggcctgttctattttttaggacctcatacagagctctttagaattagtacaggcctgttctattttgcaggaccacatatagggccctttcacctaaaacacaaaagctattagttgattatatacaatcaactaatagcttttttaagtttaaagggctgttttgttgggttatagcaccaagttaacgatactttcaaaaccaccaagaatcgatttttgcaagggcacaaagatgtgcgaagcaatcggtgaatttaatataacgatcaagatgagcaaggaaaccatgctaaatcgtgctacatgaatttgccatttaagaggcaagaagttcatcaaaatatggctaccatcgagtggtggcacaggcatcaaatttaagatggcaaagttaatgttgtacacgacgatgagaaacaatacgaggtacaaggagtcattgcccaataggttcgctgcttccaagcatcgcataacaacgtagccgataaaggccatcacaagattcgccataggccctgcgatggatacaatcatatcatcggtccgcgggtccttaaaattggtgggatttacaacaactggtttggcccagccaaatccacctataatcaaggccaaagatccaatgagatcaaggtgtacaaaagggttcatcgtaaggcgccccatcatacgcggtgtagggtcacccagtaaatctgctgccttagcatgagcatactcgtgccctgcagcagcaatgattagcgccggaatggacgcgataatcataattaaacttaatccagaaagaatcatactactccttgttatctaatagcacttggctactacatcatgtattgatttatttccaattcattaattggcttctcatttattgatttgtgttccatttattgatttgcttccctttcggaaaagcccgcattaatgcaagacaatgcattcaacacacgaggaaagccaatatacggcacacattgggaggcaatgctaatcagaaatctcttatcatttcctacgttcaaattaccaatgacatgcgccttaagctgcgcttcacaaccgccttgcgccatgagaaaacaaaaggtaatgagctcgcgttgtttagtgctaaaccccttacgagtatagtaatcaccgaacatgttcgctaaccatttattgatatgacgcatatcttcaggtcccgattggtaaaagttacgcattccttcaccccagatttccacttgcttttcgatgcccttttcaaggcgattttcactggtaatcgtgctgcgatgaggattttgaatttcttcatctcggtaatcgagtatcttattagtaatcttaaagaacggacgcaccttcccgatgccaagatacggtaccgcttgataaataagttccacgatttcatcgggaatgacaccaaaatttaacgcagctggcatcatcaacgagtattcatctgtggcacctgccccaaccaaggtagctaaaatggccaagaaacgactatgcgctgctacattacagccatcctctataatgacctcgtgaaaggcaaaattttcaaatagatcttcaaactcagggtctatatatcctgctggcgatgcaatatcggggaacatgcgttccgtataggcctgcgcaaattcagattttgccatccttacctcctaaaataattattaagctttcacctaacatacaattaatagactttcacctaacatacaatctatcaacatcataattatatgatatctatacattcatatatatacaataatggtgaaagccccttataaagaactttcaccattatacgtatcattataagtatttaattattatgcatgaacgtttacagttgcaggaacagcatttacatcagggaatgcaaactctgtgccatatacttctttccaagcagctttgaacatgttgaattcatttgtgccaggattgatttggtacaattgaccatctggagcaaagcgatatacagtgtgcaagctaggatgcacaatatatttgaacaatgcagcttcgccgtattggttattatgcatatttactacattaataccgaatacatagttgcggctaccatcgatcaaattaaattgagatgctttgtcaaagtagtaagtttctgtaccgttagcactgtttggcacttctgggtaattttccaaaccgttccagttagcagcgctagctacggaaccaaccaataatgttgctgcaagagcaaatgtagtaactaatttcttattcataatgttcgcctccaccctaaacgggtaacactaggtctactcccaatgacccaataatacaatatctaattaaattatatcatatttatcgtttaatatcttcaggattgataacaccatgcgctgcatcaatggtatctaataatttattaagcaactttctcaattcagcagcttcatgaacagtaaaaacttcttgcgtgctagctactagtttcttaggtacttcgatagcttccttgcgaagtgcatggccttcttctgaaagagtaaccattaccacccgttcatcattacgactgcgtttacgttttaagaacccttttagttctaatttcttaagcaacggcgtcaatgtaccagaatcgaggcgcaacacttgccctaattccttgacggataattcaccatattgccacaatgccatcatgacaatgtattgagtatatgtcaaattcaaaggttccaaatgcggacgataagcatttacgatttccttagctactacatacaaaggaaatcccaattgattttccaacattaaataatcatcttctggaacctctgaaacgcgattataacctgctaatgtacctatttttgccattaactagccctccattacacacactttgtatttctaaattaattgtacacaattttccattaagcggtcaatacatctttgtaaattcttcagcaacttacggtttcatagatgaggggtcaaaatgacacgctactgcgcaagcggagcccgaagtcattttgacccctcatctattccacacaataaatgctttaagaatttgcaaaactgcataaagcaagggtctgtctccgccctgcgggctccgcagggccaaagtcggcttcaaaacacccacacatccgccatgaacgctaatctatatttagctaatcgcaatatagcattttatattagaatccattaggaatttataaagattataaggaaaaagggcatatgggacagcacatcaaaattcatttctgattcttgatatgctatcccatatgcccttttgtattgagttcgtttggtactaaatatatccttagttatgatatgtataagttgtttctttgtctaccgcagccatatcaacgagcatggtccaggttaaagcttcttgcgatacgctattccattggatgggcataacaggcatagatactacatctgtatgatctaatgtgtttattaccattcgtattgatttcgtatgatttacaaaccaatcttttattgtgcttcgcgttgccatagttgcctccaactaaactgtatcattagtaatagtattactaatttatatctatacccccataggtatttactattatctatactatatacccatataggtatatttgcaagtgtattttcatttttattctaaaaatgaaaagggtcgcatatgcgacccttcggtgtgtagttattagtcaatataggttacaggattccctttgatgtcaagttctctgcggtttagtccatttggcaagtctggatagccgatggcaaggcttgcatatactttttcatcatcgcccatgccaagttcgcgaaggcgtttgattatgcgttcgttgtcttgtaggtgacgtaattggttcacccagcaggatcccaagtctagttcgttgcaggcaagcatcatgttttccatagcacaagctgtatcagagaaattattggctagcacaggtttatgagccaatacgatgagcaccggtgcattgtagtggaatacaaatttgccctctttggacattttaatgatgttcaccatgtatggcggcgtttgttccgttacttccgtcttaccatactcttcttgaacaagggttactagttctttcaacacatccggattggtaataaccataaaatgtgtaggttgtaaattgccccctgttggcgcgcgacgacctgcatcgataacggtgtcgagcaattcttgtgcaaccggttcaggtttgaatttacgtgtactatgacgtgtttttatgcattctaatgtattcatgataaacctccttttgagagtattctactatgaattattgattgcttacaagttttcctatatatagattattgattacttacaagtttgcctacatatggatttctgtcttcgtcagaattggttttatatttccaagacaataataatgccgagttaagtactacgagtaagcttcccccattgtgtacgagggcgccccatactggtgaaagcgtaccaatcatggctaagataatggcaataccattcagaatgagggcaaagcttaggttaattttaatagtgcgcatcatgtgtttggataaagctagataattactgattttattaactgtattctatttttgcatgtgtttattacacaaatacatgagcagttattcatgtatcctatccatcgtattcttaatgctcacacttggagataaaagccaatagacatatatatgtgtcctacaaaatagaacaggcctgtactaattccaatgagccctatatatagttctgcaaattaaaacaggcctgtagtaattctaatgagtaccatatgtggttctgcaatttagtacaggcctgttctaattctaaaaaggacttactgatgtctaataaattaaaaatcgcgactagttgattagaaactaattaactagtcgcgatttttctatttctatatttatataaggattccacaattccctatatggattgattatacttgcatggttgcccagatgagtacatcataaataagtgctacaacaacggccatagctaattgtccaccgatatagacaggcacgaggtatataaaaaatgcccataaggcaccgataattttcatccatacggccccaagttgtttactttcaacccaagccacaaaacgatctagagggctaacgatttttaaaatccatctaggaacgtccttatctggattacacgcgggcaggtatagcagtaataacggcaatacgatggcatcaatggcaagtaatgtggttagcgttaaagaaaaccaatcgggttccccttcccaagtcacaggatgcgaataaaaacgaagcccccacaaataggctttgtatacgatatacggttctaacagccatagtaggggctttgtaatatgcataataaacactctctctaaattataaatagtatattaattatagcatattttttacgttttaaattgtgtacttttacgcacttatatcttttttaataacattcgcggatattttccaataagtctaaaaatgaggctgttaattacagccccattctattattccacaacgattgtattatctcttctcactgtttcaagcattttagatcgcactgtagattctgtatcgagtttgtgttttccaccgtaccaagccatatcggcaccagcaaggcggaacatgattttgccataggcactaccggaagagtgttctggtttattaaatcccatatcaatggacacgcgcggtgtcagttgcagttcagtgccaagtcgcaatccattcttatcagcgctacggtccagagtccaatgataggcttctccatagatgcgagcccagcgcgcatttttaaaggtttttccataggacacggtatagccatcggtaatacgttccaatgcaccattgaccgtatgttcatcactcataccacgataatagttgaaacggaactcgctttcaccagaaagatactcaagaccagcactcatgcgtctatgttggcccttgaaacggtggtcataaaacaagttcgcgccatgcaaatgatggtcatcactgctgatacggcgatagccaaaaccgctgttaagggtcgtaccaacgtccgcagcgcgtgccacggaaccttgggtaaaccaaacttggcgggattggtcgtcataatggcctatgggctgcaccgtttctgcgctgtaaaggggcttccaatccttctgaaagctaagcgccacggtggttcgtttcatccatgctttaccattggtatgcatatcattgttgatattggacacagccactgcattgatagcggaattcaccgcatcaacattagaataccgcgtcgttttacgctctgttgtatccattaccaacggtccgctttcaccaatctgatggtccggcaaataggccggcgaaatatgaaattcctcagtattcacttgtccatttttcgtagatggcgccgtatcactggcccacacagtaggagccagtaataccacacacaacacatacactaaaaatcgcatatacacttttttacaaattgagagcttccatccattctttttctttaaagcctaccaagaccttatcttctaataccaaaattggacgctttacgagcatgccattggatgccaacaaagccaatttttcctcttcgctaagacctggcaacttatcctttaattgttgctcacgataaatcaagccagacgtgttaaagaacgctttcaaatccttaccagattgagggtaccatgcagcgatttcctcagctgtaggattttcagatttaatatcacggtctgtgtactcaatatgatgatcatctaaaaacttctttgcttttttgcacgttgtgcattttggatattctacaaataacataggaactcctttatctacatataacactaagaatcattattcatatgtatagtgtagcagatacatcgattaatttcaatttattgttttatatatcatctgttggaatagcacctacttaattatcgcttatgataatcttcgtcactttgctcccattatgttcaaaggatataccgcgaatgttatcgctattatatctaagatatccatagaaccaccggttattaaagtcgataaaatcagggcgtccatagacgtccataacctttttcaagttgtcgccaacggcaatgcctcgagcagttacagcatcgcgattgcttacggttatataccatacgataggtctgctatcttgcatcaaggaatgtccgaatttaatgcctccataggtaagctcatcacgtttttcactagtcggctgaccaaggctagcctttaccgcatcaaaagatgtaccaagggacacacctgcaattttcatatcttccgcaggcaaatgggcccctatgacctgaccaggtctataatgacgatattgctctgcttttggccaacttggtgaaaatattaattataaagtgctattttcttcatataccaaggaatataaactgaatttgcttctaactgcttcttataggtcccgtctactctccattgcggttccttttgaagtgttcttgtattatcaaagtctacatattcaatcatatctctcaactgtttatgattatataaggacatactttcatcataaagaattcgataactataagcatatactgaatcttttgtatagtgtctcaagtacgagttacctttggttatttgacgatcaatcaagaatcctggcaagccattattccatacagtagcatattgtgtaggcatatcaaggtcgccatatttatccaaaaaccacagtatttgaggtctggcgctagaacgatctatattatctttcttaaatacatgacgtataacacgaatcgtgattcccttatcttcataggttcgcacctcataccgaccttcttctatagtttgactaatcaatttagcggttttgggaatacgatacgtaaaattaccccagctttcagccttagaataagaatccaatcccactagcgattcaatagacggaataatataattactcataactacttcagcaggtcgattttgaaacggatcattcttcgtcacagaacgaccatatgtaatgccatacgtatggttggaattagacggagcgaattcagtatacatcacatgttctttagcatccgacacgaatttccaagaagtctgttttaaattgtcatatgtatactttccatgctcataaccctttatttgcttactatgaggaggacctacaagcaaaaatccagtaagactccgaacagcatataatggtcctttttctgtattcgacgtaattacatcacctcgaatactaacatcaggcacagagaaacgaatcgcattggcattgtcatgcaccaaaacaacagtagattgtgaaaactctgctaatctaacggctttatcatatccaggtttctcttgattaattttttctatcaatgaatctgaggctctcggatgagacttaacatacgccacatatgcgtctacctccttaacagccgtctcattgatatgtgaataattttcataggcatttgcaggaattttcctgtctgcaccaggtataggaggttgtccggccggcacctcaatctctacggcattaacattcatagtaaaagctaatgccatcgccatcataaataagctacgccgcatcatattacatcctcttctctcaacataaaataagcacaacacttcttagtataagtatactatgctaagaagcattgtgcctattgttttatggtttattcgtatttgacgatatatatgctctttttatgcccatacacatggtgttttcagtaagttctgaatgatattgtgccctgctatgacggtcatgactgacggagcgcaataggtaaattctggatctggcaaaatcgttttgatgtagcaatcttgtgtttccataaatgatttgtatgtatcaagtgaaaacagtccataattaccacacaattcccatctatctttagcgagaagggccaaaaattcatcggcatgtgggtcatatgcaatgttaggtaaggtgctggttgttagccctgtatcactatttgtacatggagaaatatgatacatataccctcttggtgtgatacaaagcatccaagtaatagctctagacataagagttcgtttaaaaacgccaaatacttcttgtaatcttgattttcgcacatacagagcataaaaggtttccttatattccgttgggtcatcaggcgtatcgagatatgtttgctccactacatcaatgggtacattacatatattggcgaggtcttcaatcgaatggcgccatattcctctacgtactaaactaatacgccttttggggaatagtaaaatatattcactgccaatataatcagataacgcaccaaaatgaatgccatcttgacgattaaactcagggaattgcatacgccgataatcagcgtcaatgcccgtgcaagcgtagctttcacctaaaacagtgctaccataggtctcaatctgatgagggtcccagtcccctaagttatcgccataccgcatcttgccataatcataacgaagcatcttggtatgccccgtaggagacacgcagagcacgcaaggatacccatactgttgcgtataccaaccgcccacgctgtgccaatccacaatccgattttcaggccatgcaaacaaggtcatttccaccggctgctgtccatgtacaccattcacggacgccgtgccatgaatcgtatgcttataccaatttcggccaatcatatactgccatgccaacggtggcgtcggaccacgttggccaacaggatcactaatcacaatgagcagacccatccgcgcttttcgatagggtctaacgatatcattaatttggcgcactaaaccttgattcataggacatcccccttttaccttactaatcttgatgaaagctaacgctgtttacacctttagtataaatgagtagatgtgtaaaatttagtgcataaaggcatgcaaactcattactgcaacatataagaaagttatataattatacttaataaagagaatataagtattgttatagctcctataaaaaggagcatgtaagcaggagaagctattatgccaaaattaccactcatagtgggtgctttcatcatgagcactatactgtcgccagtagtggccatcgacgtcaacattcctggtgcagattctaaaattccaaaggatgcgtatataaattatcaagccacaaccccagccattgaacaggatgtggccaattatgtagaaacgttaaagagcaccgataaagccaacggtattagtagaaacgaactagcctatgccaaagaggcctccatatatcgtggcgagcattatcacaatacggttatttccgttcacaatcgatacagccaaatccggctttcattccccgtagcaggcataaaaagcgaatataatattggccggtataaaaatccagatcgcaccatagaggattatcgcattataaccgataatggcaatcttaatctagaaatcgactatgcagattacaaagatcaggattggcgcaacactaaaattgcctatgaaaaactaacagacaaagacgttcgtaagttcttacaagataatgcaaagaagaatccagaaaagcatatttctgatataaaggcgactgtattttcataccctgccgttacctacagtacctgggacagcatgaaaatgcctcacctcaaaaatgggcaaaaaacgacgatgaccgtggataccatcaactttaaacatatgggctttgccatacggtatcctctatatcacgcaggtatcgcctatttcgataataaaccggtgttgaataaggtgcctactgacaatctactcgccaattacgtgcttccatcgatgaaaaatctcaatgagttgaatgaatattcacgcatagaaaatctaaatggcatacagtatcgcgtacctaaagatgccctattcgaaggtgaaagtaaagaagattatcaagatattagatattacaaaaaaggatccataaccttttttgtttctactatcaatcttactaataatccgtatactcgtaatcttatcattgatgggcattacaatttcagtaggaatttacattcattctgggatatataccggtaccacccaacaccagagtatattaattacgctgttgtatggaataataatatacctggcctatccatacatagttatgaaccatatagtgatattcaaatcctaaactttgaatcctatgatggtacctatcattttatctataccatcttttatccgaactttttaagtgctgatgaagttcaaaaattacggaatatgattgagttctttgattctacgaataatccggagtttaaactacaagagcatgttgtgtttccagagagtcgctaactagagaagtaaatacaactaatctgctatcttaagatacacaaacagccagtaccgcaatcgcagtactggctgtttgtatgtgtagtgtattctattctgttattatacaactatttagaatttttgaggtctctattttgtcttgccttgtttttcatgttgttctacaagagcaagaaattctttaaagttgttgattttaacggcttgccatgtgccatcatcaagttttttcatagcaaggttaaatgttacgtcttggttaagttctttggagttaaatgtaacaggcacaacagcgctattaccatcaacagtggcagaaccaatgcttttgaactcaagatctttaataccagttttttctttcatgtcatcagctgcttgtttttcacgagcattttggtctgaactttcaggttgctttgcaatggcactgtaaatttcattactcaaaataggtacaatcttaggtttcaaaccttggaacatcacctcagcaaggcctttaagtgggttgtctttaatttcaggatcttccagttgcatagccacaacatcatcatagcctgatccgataatggaatctacatcgacatgttttttgaaagcattcacatcgtgtttttctacggcttcacgagcaagattcaaggaatagaccggtgtttttgtaaagtacaagaaataccaacctagagcaacggccacaatggctacaagtacggcaataataatcttctttttagacataagggtctcctctcatgcggacacaatagtatataacttactttcaattttacactaaacccctactagttaggaaattaaattccattttattcaaaaaaatgtatgatgttgaatcctatttctaactattttatggttcatcgtcataagctaatccatatgccttctggtagattaaattaggcaatgtataacgttccaaaccaaatgtagcaggtaatatcatggcctctatatttgcttgctgaagtgaggcgcgaacgctaccatcattggtaaaagcacctgcggctttcaccatactagtaatcccagaattctcatccttagcacgccaaatcgaaatatatggtacatgaatgccttgtttaagccctttttcatgcgcattaatcagatggcgcaatgattgattaagctggtaatcgtattgaacctgaataccttgaatgagattggatgcaggcatcaatacatacagagtggcctcaatgcggcggtgtccgttagaatctacgatagttctaatagactcaagatccaggtattttccatcacctcggccagaatcaacagacgagtcgatatgttggaatcgtgccgtatctaataattcagactgtgatatggcttgaccttgcagtggtaatacgaggcagactaataaccatagaaaacgtaaatatattcgtttcatcatccacctcactgtaccacaatatcatcaaagtgttgctgatacgtaaccataaacatagtatctgctaaatcatacaggattcgatgattacgattcactgggaacttacgtgtatcctctgagtactttgtccatttcacggttccatctgattcatatctcgccacatcaatatcagacatatataagccagaattgctttcactagcttgaatcaatgcaatcatagacggacttggattcatcgtgcgagacgaacgaatcaacgtagccaatgagtaattcgtatcatactctacagtaagctgtttctcttgaatcccacccccataggatgcaaccgtagctatataatagattccacgcaatgtgtactgcggcggtgcatagtgcaaaggctctacagaataagtatttaggtaaacgtagatgccctcttttccaacagggttactaaactcatggtgatgaaccaatttaaactgcggcgatgtctgtaactcttgtaatgtaattgcctctgtaggcatggtaaaaactagcaacacaaaagctagcattaaaatacgtcgaatcataaaaacctctctcaacataaataagcacaatcttattagcataagtatactatgcaaataaggctgtgcctataatttataaaatatatactattttattttttgtagtgccaatttaatttcttgaagttcagcacgtaaatccgcattatcagcttgtaagtccttaatttgttgtgccatttcaaagcggctcatttttaagctaggatcttggtatcctaatttgagagatgcaccgagattgaaggtactttcactacctaaagcaacgccaagatgaaccatcgtattttcattcggttgataagacgtaccgatagcaccagccgttgcatttttataatgacctacgctagtcgcaaaggaccatttatcatttggattgtagtccaagtaatgcaagccagataaagcagctgacacagcaccagctttgttaatttggctgcctacgttccccataatattgctaacattaacattcgcagtagctgcgcgcaattgacgaacgttaacggcatctgtatctgcttgaccatcgtctacattttcaattttcatatcccctgcatgaatacccgcttccgcatcatacgtcagattaatgccatctggtcgaccatcactaatagttatacccgtcggtttaacttgtgtagcatgcactttcacagtacttggatccgtccctggcacaatagagttaacggcccccacatcaacgatgttcaatccattgtcatcaaaatccatactagtattgtgattcgacatagataacgtgcccggtttaataatgacacgttcattactaccatctggaaactcatcattaatccaaaactgctttgaagaaatagtggtaccatcaaagcgattatttgatgacgtactgccgatagtaatcgtatcagtaccaacattcactggtgcgcccataacattcacactcaaaacagacaaaattcccgttaacactaataatctcttattcatgataactctccctctaacctacaggatctaacacacacaaataacccttatagatcctcattcatacatacttatgaatatagataaatactgaaagaaatctcatattccccaatataatttcattataagcactacttatttttacgtcaacgatgtgttttcattctttattcatttgttactttcattctactcactataataaataagggagtaaattatatttttttacatccatcaacacattactattcccatgccgattacgttggtatcgaatcaatacaacctgattcgtatatttattgaatacaaaagataaaccttcgttgtgataccctacgtattcacctacatagtacccagtatatgtatcatatccatgatagatatctccatatggttctgctggtcgtccccattcagtatcctcaagaagcggcccataaagagattctacttcgcttcgcgtcatacctatcatagcccctttattagttgcatatccagattttgtaatatatattgtactcggttgtgtacgcaaatcccataatgaaataataaccgattggtcagcagagatatacatatcatgataggaataatgatgatccgctagccataaggaataatggtaatagtttaaataagaatacatatccgaattagattctaaaccggctaaaacgcccgcatcatcagttttagcaaacgcagtttgccccatacaaccaataataaaaatagaacttaacaagagttttacaaatgagtgtttcaatagaatcacctcttaaagtttgtagcaatggccttttcgtttatctagctaccaagcggtaacgaagggctatttgctttttgtaaggcaaataagcgccccctatttcacaactacatcatcaaattgcataccgtacacacgttcatacaagcggttagccaaaagatatcctgcaaagccaaagtctacaggggccgttgccatccatctatcactcgcttcgctttgtgcatcatatcggtttccatctacatggaacactttaaaatcaataatagtagatgaaattcctgaattcttttgtttagacaaccatagatctttatacgatgctaattgatgagcctccaatttcttaattaaattggcaaaggactgctttgtattaaaggtataaagaacctgcttttcctgaatcgtgtcaccagcaggcatgagcacatactgtgtgatggtaatttgctttgttccattcggcccgttagaggccttgatggaatccttatctatataggtgccatcaccattgccgctttcaccaaagccacgaagcatttcatagtggctagtattttgtaattcctgcatagacatgctatatgttggcaccacacaagacagtaccaatgccattgttatatataatactttcatcatccgcctcatttcaccaccacatcttcaaaatgcatccgatacgcttcatagaataaagtatccgctatatcataacgcgtcgtattcggagccatgcgcaaaatagcacgcgtagaggctttcacctgaatcggcaacgactgcccatcaaaagagaatacgcctaagggttcctcggagcccaccatgcctgttttcgtttgtgccgcatcaataaccgtcgtcaacgaagcaccggcttgttttgcatgatatacctgactcgccagcgacaaacgagtgtcataggatacaatccaggaatcactataaataacatgtttccgcggtgattgatacgcattgtataccgtagctctaattatatacataggtggtgcatactctaatacctctatggaacgcgtatctaaataccacgtagtatgctcatccgcattaggaccatcaggcgttagctcatacatcaccttaaactgtggtgacgacttgagttcctgtatcgatatcgcttggctaggtatggtgaaagctaacgctactgctaacattataaaaatacgttttaacataagactctcctcttagagattataatataaacactataactcactcattcatcttaatttgacgatatatcataaccttattataatataagaagatagccagacgagtcgtaacgtcaggctcatctcgaaggaataatcttgtgaaatggcctttctgttatcgaattataaaggataacgaagggctatttgtcttttcctagacaaataagcgctattaatgcaccaaaagcgataacaacagccatcacctgcaaaaggagcataatgatttcataatcactcataggcttacccctcccttcaaaaacgaagagaggcccaacctcgtctaactatcttaggctcattatatagcaaacaaacatgcgatacaataagcatcgtattatacagatttatagataaacctctactccaaaaatgatatgtcacacctttactggacactcagtaaaaaggaggtacatatcaaatctaggtagaggtttcttttcatatctacattatattatccactatagtaaatgaggcaataagttatattcttttacatcacttagcacattactattgccatatcgattacgttggtaccgaatcaatacaacttgatttgtatacttattgaatacaaaagatagaccttcattgtgataacctacgtattcgcccacatagtaccctgtatatgtatcataaccatgatagatgtccccataaggtggttcggctggacggccccattcagtatcatcaagaagcggcccataaagaataatggtaataactcaaataagaatacatatccgaattagattctaatccagctaagacacctgcatctaaatcgccatggttaaatccattttctaattgttgtaccacatcttgaggagaaataatacaagcaaaatggttatttcgcttctttatcattccaaactagcaatgcaccaatggcattaagaatataaaatacatatttaccaacattggcaaagtttccttgagtgaatgcttttagaagctgaacgatattatagaccatccaaaatggccattgcgtatttaattttagagcgttaaatagattagcgatgagagataaggcaaacacaatcgttgtaagaatcgataagaaattaatatgaccgctaaaccctataaagttagctatgatagaaaaaatgaaagcaaccacggtaatcatagatcctacccatcgtttttgtgatggactcatcgtattaggaatcccatcatgcgatgctttccatttttttatagcaaatgtataaataataaaggtaacaggatatgtaataatcgcggctttattaccaagaatgaaatcaattacacctgataacacagtattaacaatgccaaggtagttcccccatttgttcaattggccagtaaatcgtgtagacaacatagaaataccaacattgataacagaaataaggccaaatggaactaacgcagtccatggtccccaatctacaaatttctcaagtcgagaattaagataccctgcagagattgcaatgccaactacgagtgccacgccgattaaatcaaaccatcttgatgtagcaaattgttttaaatactgtttcatatgtatggcctttctacacaacaagtttaaaactgttttaacacaacacaaatttcaatgcaatagtcaatttatataatccatagatatagccagtacctctcttcaaagatactggctattttcatgcatatatactattcaaacaacattatttatgtgaaacacatagctcctccaagataccagtgccttcttgtactcgtcaatggtagagaattttggtgtatagtttgttaaccattcggttagtgtaggttgtgtcgcctctgggtctacggcaattggtaagtcccagatgttaccatgtttgccttcaaagtagcgccatttgtcttgggcaaagaaaacaagtatgaaaatccaagccaagcaaaaacgtcgtcgtttccttcccctctatcggcgggaataaggacggtcagatgacattaaatatgcccgttgtactaatcgtaatgtgatgcataatacctcctatataacaaactatatactaaaactccatatatcatctatatttgacgatgaatgaaatcgccgttataataaaagaagatagtcagacgagtggatacgtcaggctcatctctaaattacatatacatgtagaaatggcctttcagttatcaaattatcaaagataacgaagggctatttgtcttttcctagacaaaaactctattagttcctcaatagcaataacttacatcatctatatttgacgatgaactaaaccgtcgttataatataagaagatagtcagacgagtagttgcgtcaggctcatctcggaaaacataaaattttgagaaatggccttttcgtttttactaatctccgggttagtggaaatgaagggctatttgtcttttcctagacaaataagcgctattaacgccccaaaggcgataaccacggtcatcacctgtaataggagcataatgatttcataatcactcataggcttacccctcccttcaatgacgaagagaggcccaacctcgcctaactatcttatgttaattatatatcaaacaaacatacgatacaataagtatcgtattatagagatttatagatgaaagctctaccttagaagatctagggtagagttttttgtgtttatagtatatctacattactccgtatatcaactctgtctttttaactatatacaataaatagtaagtgatatcaaagctttcacataaacgattttccgaaaggttgttgtatgatactatataaaatatgaaggttttatgaatgtatgtataagggaagggtttcgtaatggctactaataaatttacttataaaaatcatcaggcacctacactgtttgacggcttgcaaaaggcctctaaagaggaactatcctatttaatcgcactgcttcgccagcaaacgatgaagaatattttctcagataaattcaataacactgtaactacggggaaaaaagctttcaactcagttatgagtttctttggaaaaactaataaaaccaatgatgatatcgaccgtgaaagtaaagaaaatcatcaagatattaataataaaataaaagaggaaattcgtacattacaaagttattcacaagaggaactctatacattatttattgaagaagttcgcgaggaattagatgtaccagatagtagcctatccctattatctaacaaaattattgccagtgccgctaaaacagattcttcaattaatgaagagttaactgtcgagcaaaaggcggatattatttaccaaaaaacactgcaatccatcatttctagcctagaaaaacaaagtgatgaagagcgcaatgaaatgattcgtcaactcgatatagagctggatagcttatcatctgaccgaaaagaattaatcaaacaatctttacaaacagatcatctaagtggtgaggtattacgtaacagcttgctaaaatctggcgtaggtattggttcacttatcaccgtcggtagttcctttggggcttacatcgccatcaatacaattatccatgccatatttacgagtttcctaggtatcacccttccctttgccgtctatactggtgtggctaaaggtgtttctatcattgcaggtcctattggttggtgcgcattaggtggctattctatttactccttcattaaaacctctggaaaattaacatctgccatgatgtctgttgttgtattcatcgctatgacgatttatggtaaaagcttctccgtcgacgaaaatggagcgcctttatggattaccagtgattccattgaatatcaagagtatcaaaataaccaataccgaattatccaattaaatgataaggtaaaaattctttccaaagatttaacgctttcacaagaaaaagctcaaaaaatagaagcggctaagcaaaagctggaaaaggcattacaaaaacaacaagccaatccaagtcatacaaaccaacatgttgtggatgatttaaaagagcagattaaagtaatgtcgcaacagctaaatacggtacaagaaaatcgaaaacatatagaaaagcaatatcaagcacaaattaaagagtccgatgcactaaaagctcgtaataaagaattaaaagcacaaaataaatcattacaagaggaatctacttattaccaagaatgtagccttgaattcgaagagaaaaataaatcgctccaacaaaggatgacggaccaagaaaatcaatcagcacaaaaaatccatgagctagaaatgcaactacaattgatggcggaagatgaaaaagaatatgagaacgatccaaaacgtctagatgatgctaaggatttacaagaaatttacgaaaaatttgaactagagaaacagttcttggcagattatacaagtgttaataaaagagtgcgtaaaaatattatggtaatgcttacccgcctatacgtaaccgatgatccaacacaaattgatgccactcataatagtaaaatcaattcattgggattccctatttatcatatggaaaccgctgatggatatcgattatattatgcgtattcaaaaacaagtgccaaaccaattcacattctttgtcactgcataaaatcaaaagaagcagtctatttcaataagatgaaaaattcagaaacatttaagaaaaaattccgaaactaaatcacttgaagcactatgatttatagggttaaaattaaaatatattcttatcatatacaaaacaagccaaggagagaatcatgatttgtcaacattgcggtaaccccttaccggagggcgccaaattttgcagtatttgcggccaacctcaagcacaattaacatgtaacaattgtggcaccccattagagcccaatacattattctgtagcaattgtggaacaccagttactaacacatcaactgcaccagaagcagtaagaactccaccaacacaaaagaccagtcctgtttatgactgggatccctttgaactcaatgaattagatacacttacgtttgtgctcaccaagaaatatactgaatttcaaggtcgtgccagccgtagcgaatttttcagatataacttgatgatttctctctgtctaacaatcatccctattataatgggtatcattaaattagtgtctaataatatcatgactgttatcgtcttatatgtcctactaggtattatcgaattagcattaatacttccaggcttagctattgccgtccgccgtctacacgacaccaataaatctggttggttcttccttatcaactttattcctatcgtaggacccatttggttcttaatcttaatgctaaccaaaggtgatacatatactaataactatggtgaaagaacctcctatatccaaatcaccccagatattcaacaacaatatgggctccgaccatcgccaacctccacatctaccgcattgtatatcattgcctatgtcgtactcataagcataagcattggcttgagcgctgctactatcgctactagttttaattccataaacaatacaacacctacccactattctacgaatactaacagtaataattcgtctgtgaaagctatacctgccccacaaccagcatcaacaaatacacaatcagtggcacaaaataatgcggttgaagaaagtacaaaagcgttgcagaactactatcgctacctaaccaataaagactttgctaatgcctacacgtacctctctgatgaacaacgtgctagcctcggtacctacgactactggcgcaatggatataaatcaaccctatccaccacattactttcaacaaaagctgtatccgtctcaccagatgccgttgtatataactatcgcattgaaagcaaagacctcgttaacggccgcatcaaacatcaaacattcaccggcaatgtaaccatggtaaaaaacaacaataactggatcatccaagaccaagatggtcaattagctgattcctattacgaataaaatacataatcataaccacccgtagaacgggtggtttgctctgaccctataagggtctttctctagtggtagccctctaaagagggctttgaatgatctgacaaccactctattaccactggctgccccctactcgggggcttttattttgcctattttaccggctcacccgtaaacgggtcggtatattctttaaagtttaatgtatcttgtgctatatcttcttgtagttgattgcgaatatactcttttatcgctccttcgtatcttcccactgtatccacataatatcctctacaccagaaatgtctatttccatacttatattttaaatttgcgtgtttatcgaatatcatgaggctacttttgctttttaaatatcccataaaacttgatacacttaaatgtggtggaatagttactaacatatgaatatgatctggacagcattctgcctctataatctctacattttttctattacataaatctcttaaaattttacctacatcagcttttatccgaccataaattatttgtcttctatactttggtgcaaaaacaatatgatatttacatctccatttactatgtgataagctttttacgtcattcattgacattgaacctcctatgttgaaatgttgtggttgccagaccaacttcattttaccactaggaggttctttccttttctctaagaattttttaccgacccccagtttaactgggggtttagtcatgcctattcggcgtacaaacataaaagactcgtatcatttgctgtgatacgagtcttttataatctatgctattactatccctaaaattataaatgctaactactattactcatacatcatgagatctctactatttcactaatttcactagcaaacaattcataacaatcaacatatatcgatgcttcatctggttcattatttgcgccagaaacaaaagagtctaacttgcctatcaatgactctccatcaataaatataacctctacatatgttgattgtatttcatgataacgattatataactcttcctctgtcataaggtcacctctactttagcacccctttacgcacaaggtcccattctacgttttctatctcctgcgttaattcttcattcaattcacgtattaaggatataaattgtgcacgcttatccgcatcattccaatcaattagtatcttatgcaatttaaattgtaatagagtgttttcatattgcttatataaattaccttcagagcatatatccccagtatcagcctcacttttatataatccatcaatagccctcacagtatcagaaatattctttactgataatatgcgatctttaatatagttatacacacgggttttatatgagcaggtattgctttcaccattatcaccggcgcccttttcccaccacgtatagtaacgtaaactcaaaactgggccttctttaattttatcaatacgccaaaacatatatggtttaacggttaaattgtcctcatttgtattttgaaagccccaataatcggcatcaacagttcggtctagagaacggtcccaaaagtgcatcaacgaccaaggtgtaccaaagctgctgccatgctgaatcgtgtgagtttgagacgcatcgtctatgcgaccatatacatatgaatcgtcaatattctcaacatgttgtttcaagacggccataaatggtgcttcatgatttggctgattaaatacagtctgcaaaaatctccgttgggcaatcgcagtatcttgaatattaaaacgtatatgcccatcaatatcctcatagtgttcccaaaaacagctatgctctatagtagccctaattttagaactcaaataatccacaaagctcattaaaattggattattccactcacgacaagacagtaacaaggataagaactctggcccatccacataggtattaacctttggatccttctccagttcccaaaccgtattccagtcatcatcattgaaccaatccgtcttcaaatacgcagtatgaatcgtatactttgacaaatccaattctcccggttcatctcgtaatgcccatcgaatactattcaccgcgccccagcaagcagtctcatcacgtttttgctgttgttcctttttatcatctgaaagatgttgatatatatccaatccattgtattgattcgatccaaatgtttttgaaagcaagcatttataccgattaatctgattgccatgctcttgtgatgatgttttgtcttcaataattaaagccgcctgtaattctggaaccaatacaagtacatcaatattaagcaactgcctaaaaatatatacccgattaactttagatacatcataagccccgttcaacaaacgagataaaaattgagacccaaactgccgcccactttcattatcgtcgcgagcaggcatattaatccaattcaaacaccaacaaataaaagcatcctgcgacaactcattcgtcgcaaaattaaaaatattattctccacaatccgttcgtcaatcatagctcttaatccccttactaacctctacactgaccaaaccttgtatatacaactcggtccattcaaaataacaataccattcttaagacaagtatacaatcacaaacgtgtaaattccgtaccatataaataccaaattatgccataacatcacctaaaccacaaacgtaaatagagaaagaccctatcggcccctcaaaacgacttcgggctccgcgtagcgcagtagcgtgccggcttttctctctcctccagaaacaatgccactacattacctccatacaaacgtacatagagaaagcccccatctgttccaaaaccgactttggccctgcgaaggccggagtcagactcttcttctttaaaaacaatgcccattcatcacctaaaccataaacgtgcatagagaacgcccccatggtattctaaaaccgactttgccaggctggctacgccagccgtctaggcggtggaggttttaggatgccatgggggcgtctaactataactaccctttgtacttaggtgatgtagggcatgtttcaggcaccacgtctttgcggtcccctagttgtgcactacggtctgtatagtgtgtatgaagtagttcgtgtgctttatgtcctaatggttcgcccaagaagtttttgtataggtcttgaatttctgggttttcataggatgccacgtatttgtattcttcatcagctttgtaaagtccgccaatgcgggcttcttttgttttcacagcttgtggtaatttagtacgtggttgaccaccaccaccaatacaaccacctgggcatgccataacttcgatgaagtcatagtgtttgccattttctttcaaagcgttgaggaaatcacgggtatttttgccaccgtgtacaacagcaacggacaatgtcacgtcatcgccaagttgtacagtcgcttcttttacaccattcatgccgcgaacgtcttcgaggtgagtcaatgcatatggaggtggttccttgtcagtgatgagcttgtatgctgtacgcatagctgcttccataacaccacctgtattaccgaaaatgatagatgcaccagtttccataccgattaaatcatcgaacttagagtcttctaagctaccaaaatcaacaccttcgtcattgagccaatgaatgaattcacgtgtggtaatggaaatatccgtatccatgccgaggctttcatcatcgtaataacgagccgccgcattttcctcaacccgcttagtttcagccttcttcgccgtacaagggttaacactgacagacacgatatttgcaggattaatgccctttttctcagcaaagtacgttttaatcatagccgcttccatagcgatgcaagaacgggtactggacaagtttggaatgagttcagggaaatagatttccgcaaagcgcacccatgcagggcagcaagatgtgaattgagggatagtaccgccattctttagacgatctacaagctcagatgcttcttccataatagtcaaatccgcgccaaagttcgtatcaaccacataatcagcacccaatttacgaagggcgctaaccatttttccttctaagaatgtgcctggttcgtagccaaagccttcgccgatagccacgcgcacagccggagccgtttggataacaacaatcttgtcagggtcagcaatagccgctttcaccttatcaagctcagatttcgcatgcatggaatcgaatggacaggcagccgcacattgaccacagtggatgcacattggcacatcaccggttgattcaagatcgtaataatcgagcacgctcatcacatcggcgcaagcgcgacggcacaaggtgcaattcttacacttcgaaatatcgtggtaaatggacgggttgtcgagcgcgattggcacgcgtttgtcgataaattcaaattgggacatgaggacctcctcgttctgtataatcatacctattgtgaaagttttaatttctcctatattactagcataacaaataaggaggccatcaatcaacgtactaggctagtaggaattgaaagattattggacttcataaacaggaaactttaaagttcatacatcatcggtacatcgatgagctctacccgttcatcgtctgagacaaatccaaaccctcgtttgctaaatagccaatagtatggttcaccgtgtaatacacgggctttttccatgagtgatcccagcacatcttggccaatcggttcatttttccatttgcactcgcccactaataaatgacgtacaggccgtgcattgggattcgcttgtatgtccgccatggccactacatcgatttccacttgctttcttgattcagcatccgtgccccaccaatgacctatttgttgtggcaagaacggaactgagcctcggtgaatgcgcgcctgtacatattgtgctgccatcgtttcaaatacgggtcccatgaaatgtgaaagcataggtttaacatattgatggtatacaagtttgccattaaagttttcaatggccccttggttcggttctacaaaacgataccaaaaggtatacatagaatctttaatggtataaatacttttattagacttagatccaacaggatgtattttttcgatgatttgtaaatcaataaggctttttagataattattcaatgcccccgtcgtcatatctaccttagtagcaatttcgttattacggctggctcccttagcgatagcactgaggatggcattatactggcgcggctcccgtaattcctgctttaatagactcgatggttcatccacaagacgtcctgtaggtgtgaaaaacaaggaaataatgctttcatcaagagaatcaccatccctaaaatatgataaatattcagccacaccaccagtaaggccaaaggcgatagcactgtcctcgtaagaaagatggggtaccatttgacgagcttcgatatacgtaaacggtttgattttatactgtgccgtgcgacgaccatacaaaggactcttatgaccaagcacctgattttccataaaactcatggacgaaccgcacaagatgagcattaactgagaccgatttttatacgcgtcaatcaaggcctgaagctcagacgaaacggacggaatcgattccgccaagtacggatattcatcgataataaatatacaacgatggtctaagctatactcaaataaatgggtcaacgccgccgtgatcgttggaaaattcggtaatgtggactgtaatttaccggtttcaatcatccccgttgcacgatatacagcttgtgaaagcgcctctaaattgttactcgcaccagattcgaggcccaccatatacgcgccatcatgagacgacaaaaagtggtgcaacaaatacgtcttacccacacgacggcgtccatacacaatagccaattcaaaacgttttgaattatattgcgcctccagagaagctaattcatgttcacggcctacaaataccatatcgcacctcctcattaatctaaattacgctatgcaacaaatatcctatctatatcttctttagtataacacaatatagtatattacgatatactatattacgttatactaaattacaaaacaagataaaacacttatcatatcagtgtctatctagtgttataaagatttttacccacacgttttgtcctataactcaaactcatactctgcatataaacacaaaaaagcagctctttcgagctgctttgtcgtataaggtgtatattattttttaccttgttttgcttgttgtggccataagaagttgtaaactgcttcggatggggaaccagcaacaactggacggtctttgccatcaactttatcttcacgttctgcgtaaccttgtgggttgtacaatacaaccttttggtcttttacagttttctttttgtggttgaattcttcagttgcgatgaaatgataaccttcagaatcttgagctttgatcattacagttgcagttttatcgcttttttgaacgctatcttgatcgatggaccaagtgatacctgcactatcttgaccaaatacttgccagttaacagcactagcagaaccgaaaccgaatgcgcaaattgcagcagcagctaaacatgtacctagtaattttttcatatatttcacctcgtataaaattaaatttaatttattataccatatattaaatgtattttgcgtgaaagctaattttttgcgatacttttacgtaaaatgtacttcgtcctacaccatgtcgctcaataaagccctcttctacaagttctttcaatgctttttcaacagtagatacagctatatctggttgtttctcaaggattccagatttcgtaatcttaccaatagtggcactaattatgatttttatacgatcctttgcagataacgacgtagtcagcaattcaatacggctttcaaaatcacgataggccgccaaaataacgcgaagcatatatttgacaaaagggactatatcttcatcgcctgtgtgccaacctgcgccggattgagctaacgccgcataataactgtcctttgtacgctcgattttttgctctaaactaatgaacttacctatcatgtacccattttgatacaagagcaacgtcgtcagcaatcggctcatacgcccattgccgtcattgaaaggatgaatacacaaaaaatcgtgtataaatacaggaatcacaagcaatggattcaccgatttatcttgaagaaccgcattaatactatggcaaaagtcatctatagcagccggcgtttcatatggtgacaatggcctaaagcgttccctctcagaaccatctgcaagccgttcaattatcgaattctgtacatttttatattgtccaccaatccccttgtgggaatacgcatacaaatcacgatgtaactgcagtacaatgtgccttgtcaaatcgatatactcgtaattttcatgcaccgtattcaacacatcgcgataccccataatctcttcctcatcccgattacggggcatcgtcttatccgccaccaacgaacgaatacgagccttcgtcgtcacaatcccttcaatccggttcgacgactccacactctgcaccttcgcaatatccacaagccgcgccacactactaggccgctgcgatacaaacaaatcctgccgccccttatactcatgaatctgtgaaagcaacgacacaacctcaccatcccacagacaatcttcgagccgccgataatcaaaactacgcataccacaccacctttcccctatacgaatatttctcccctaattttaatacaatttaggcgataaataaataaaaatatatcttccttctccggccctttgtgaaaaataattttgtagataaaaagaactcaattctctgaatttgtataaatgatagatgcaaaatgggattgatggggccgaaaaaacgactttggccctgcggaggccataggccggagtcagacccggccggtggaggctttttctcccttctccggccctttgggaaaaataaaattctaaggaataaaaaatgcttatgtttctgattttgtattcataatatagaaaaggaatggtagggaatcgaaaaccgactttggccctgcgaagaccgcaggccggagtcagacccggccggtggaggttttcgatccctaccattcctatcacactatatacgaatactaatattcagaaacataagcatacaaatttaattaaattttattttccccaaagggcctgcattacttctgctcctattgtatctttctcaattttcacaggtttttgtttttcattgctactcaacaacggtacaccagattggctatacacagtagcgttaacttctgtccaagtgctatctgggcgattgatttcaacagtgtagatataggtataaccttctacattgttggctttcaccaaaatacgtgccatagaatctgttttaaacacagacgagttatcgataaaccatgcggaatcgtctgtatccgcatcaacgtagtaccaatcagcagcattagctacgccaaaaccaccgaaaaatatacatcctgctgccataatggcagctaaccattttttcatcattctctcctattcaatcctttattcattcaactatatatgggcatgattgtggtttggtctctacagaacgtcagggcctaatagataaagcaactgctcgtcctgtataacacgagtggcgaccacttaggtgatcgccaattgtgcatatctatgttagatatagtatattttcgttactttgcatatagaatacaaataaatctatatgacatatacgatattagtcttcgctttcgatttcagacgcaggaattacagcaatgcttgctaccttatcaccttcgtcgaggttttgtgttttcacaccagaaatggctttgccttttttaacggcaatgtcattcatgttaaagcgaatgattttaccttgttcggaaatgagcatcacttcgtcatcattgtgaacgacttcaacggctactacatcgccagttttatcgttaatgcggaagttctttgtaccgatgccgccgcgtttttgtacattgtacgcatccgcttcgttgcgtttaccatagccttcttcagaaatggtgaacacttgtgcttcgctttcatcagactcaagaacaccagcgcctacaacaacgtcgcctgttttcaatttgataccgcgcacaccatgagccgcgcgtttcatgagacgaacgtcctcttcgttgcaacggatggccatgccaagtttcgtaccgattaggatatcttggttgcctgtagttacaattacgcaaatcaagcggtccccatcatcaaggttaatcgcattgaggccagaacgacggatgttgcggtattcttcaatagccgtgcgttttacaacaccgaactcagtaaccatgaataagtttacattttcatggatacgttcaaggtcaatcatagtcgtaacggattcgcccacagccagtggcaatacgttgaccatagcggtaccacgagagttacgggaacctgcttctggcacttcgtacgctttgaggcggtatgtacggccagtggacgtaaagaacaacaatgtattatgcgtgcgaacatgcataatttgtgttacataatcgtcttccttcgtcttcatgccgataacaccagcgccgcccttatgttggttgcgatatacgttcgcgttcatgcgtttgatatagccttgtttcgtcaaggtaattaccatttcttcgtcagcgataaggtcttctacatcaaggtcagacgtatcgattgtgatttcactgcgacgagggtcgccgtatttcttcttcatatcttccaattcgtctttgatgatttgacgttgacgcgcttcgctagccaagatagctttcaaatcttcgatcaatgccaacaattccttgtattcttcttcgattttttcgcgttccaagcctgttaaacggcgtaaacgcatgtcgaggatggctactgcttgtttttctgaaagcccgaatttttgcatcaatgcgttacgtgcaatttcgtcagtttgagaactgcggattgtagcgataacttcatcgatgtggtcgagggcgatcaacaagccttccaagatgtgtgcacgcgcttcggctttgttaagctcgaattgtgtacgacgtacgataacatcgaggcgatgatctaagtaataacccaatacttctttcaaattcaatacgcgaggatgaccatccacgagggccaacataatcacgccgaacgattcttgaagttgagtgtgtttatataatttgttaagaacgatatctggttgcacgtcagcgcgcaattcgataacgatgcgcataccttgacggtcagattcgtcgcgaagtgctgtgatgccatcgattaccttgtcacggctcaagttcgcaatcgtttcgataacgcgagccttgttaacttggtatggaatctcagtcactacgattttatgcttgcccttcaccatttcttcaatggttgcacgagcgcgcatttttacgctgccacgacctgtggagtacgcttttttaatgccttcccggcccaaaatgagcgcccctgttgggaagtctggacctttgatttgcgtcatcaattcgtccacagttacatctggattatcgatgagcatttcaagaccattacatacttcgttaaggttgtgcggcggaatattggtcgccatccctacggcgataccgctggaaccattgatgagaagatttggaatcttcgctggcaatactgttggttcttgcaagctttcatcatagttcggcatgaagtcaacagtttccttgtcgatatcagcgagcatttcttgcgtaattttcgccatacgtacttcggtataacgcatcgcagcggcactatcgccgtcgatggaaccaaagttaccgtggccgtctaccaagaggtagcgcgtattgaaatcctgcgctaaacgaaccgtggcatcgtaaacggaactatcaccatgtggatgatatttaccgagaacgtcgccgacgatacgggcggatttcttgtatggtttattaggcgtcatgcctgtttcgtgcatcgcgtacaaaatacgacgatgtactggtttcaagccatcacgcacatcaggaagagcacgcattacgattacggacatcgcataatcgatataggcgttcttcatttctttatcaatctgaacgggatgaatattcccatgggaccattgttggtctgccacaatctcacctcattttactaacactgattacaattcatcatattattatagcatttttgtgggtttagcgctattgttatcaggatttttagtgaaagcatactctaacacttacaaattttatctctcccccatatatttagggattataatcccaattccgcacaattttaacgagtttaaggattacaatcccaattcaccaatatttttatccgtttatggattataatccctaaacacaattatgaatataaatctaatatccgactatgaattgaatacctgcacaatagtaattacctatttaaaaatatatctatccttgttacaataattttgtttttattcattattctatattctatggaattttataaatagaatgtacagagaggagatacatatggataatcagaattcaaaatttcacttacccaagatttcagccattatctggatacaatttaactatgttcttttacaaacttatcaaaatcagaaattaccttctgatgcgtattaaacactttatattcactaacagctttcttttgagcctgtgtcatagaaatattacccttgtttgttaggatatgatactcattaaagtctaaaaacttatcaacactttcaataaaggctttcatagtaaatgtttcacgtcgttcgataatacgctctatataatcaaaaaacgaagatatagttcgctctaattgttcaatctcttcaatggataaataattttttgctacaattacatcctttttataaatccgtccttccggtccagattcccaagtagtcaatcccatatgattctttgtagcatccgcatgactatgaatgatttctgcagcagtttgaccagttatagcataatgaaacttattctgtatcgttccaaaaaaatctctagttataggtgattgtgcatcataatcgattgcacacgctgcaaatatatctgtcacttgttgatatatacgacgttcactagcacgaattgaacggactcttcgtagcaactctttaaaataatcttggccaaatgcgcgtccattttttagcatatcatcatcaagggcaaaaccctttataatatattcacgcaatacgcccgtagcccatatacggaattgagttgcttttttactgtttacacgataccctaccgcaatgatggcatcgagattataaaaatccgtaagcctctttacagtacgtaagccttctatttgaacttgttccattttggaacaagttccaattttttctaactctccttcagcataaatattgcttaaatgctttgatatagcttgtggattaacatcaaataatttcgacatatccttttgagtcatccagaatgtttcatctttatataacacattggtggaaacagactcattctctgcttgatatacaataacatttccggtaatcgcattttctaaagatttcatataattccctccgacaattatacttagccttagttatatcctatgctcccctttaataattcactacagtcacaggatcattatttcgatatttacgactcgtatgaggatgatctcgctctaccaaaccttttaaagcttcatctaataagcgccaaaaatccttattatcatctgctggtattcccaatacaatggagttccctttagaatacgtaatacatgtggatgttatatcatcaatgataggcaaatatacaataataacaccagatgccgctagcatatctttaagtggctctttagccacagtcaaagattcttgtaaaagttcttttatttgaggaataaaggctttaagtaattcacaatcataaggatttacctccacaaatcgagattcaccttttgtaatttgtaccaatgtataaatagcactctgttttgctttatccatatcctttatattctcatataccaaaggcataaccatttcatcagccacagttttcaaagatgctacctcaaaaaacttttgtaaattattaacttgttccgctttctttttagtttctggtacaatgcccaaccgagctaatttagcatacccaaaaggcttggcaaaatttatttcctcatcaatagaattttcatactctacctttagtattttctctctatatccagcttctaaaccattccagaaacttgcatctacgccaaatacacgttctagacgtaacgctacatcctgtgttagaggtacttcaccattaatcaatttactaatatgtttctcactcatatccatacgagaagccaactctttttgagtcatatgtctattttctaaaacttctttaatagtcatgcctggtggaatcgctataaaggtcttactcctataaattttcatatcattcgtgctcctaattaatgataatccacgatttcttgaatctctacaatatctacagtatcaccatactgagtaaaaattaaacgatatggatggattaaatccattgcatattgacctaatctagcaccgtataaaggatgacatcttcctaatcgtaaacaaattaacatttcaattgattcagcataagtaagttgatctaaacgttcatttattttcactgccattctaagattatattttttctgtgctacattaatgtccgtacataccttgcgtattttattattcttatatcgtatcttcaatacctcaccgactctctatctaacgagactagatacaatataaatggccatctataataatttacctattaggttaattctattatactcctttgtaacaaattgtaaatggaaatttacctaataggtaaattaaaatatagaataataaattatacaaattcaatacatataaaggacgtgcaaatcaaattgatttacacgtccttttatcagcatatcatcagtagttatttccattttggaaataactactgatgatatgctactttattaattctcaacaattatggaatccagttgattcatcctaaattcttctaccacatccataaaggccttattatgtattggattttcagtcataccaaacaaatggctcgtgcaatcacagtcggagcagccaaattttggcacgtcccactcggaaatggcacgcaccgcatcagctaaagcacattcgacgctcacatctacatcatcagggtctggcatgctcggcatggatgggtatggttcgtgagtaaggctccagctttcaaggggtagtccgctcgtacgaataggcacgccggcaatcatttcgcaatggccgcggaagtaatcgaggtgccaatgcattttcttgcgttttctcttatggcgctcaatgcgtttcgtaaggttcgccttggcggagccgacatacatgtaataacctgcattaaaatgcatcatgcccttagatccgatttcaagatctagctcatggtcaaggtgcatcaccatgatgtatacgccgctgtcgtgcgcttcgctgtcgagaacatagctcggataggtacaagcgcgtgtcacggtaggcattgtgaaagtctcatcccacgctacagcaacggctttccagtcaagatatggggccacttctttaaaggtcgtggcaaattctaaatccgtatggtagtccggcaagaaccattgagcttggtcccattgtacaaggaataatacgcccgtatggtagccttcattttgcagttcccgtaagtgcaataaatgcttgcgtccccgttctgtgatagcatcggggaacatggcaccggtcttggagaacaaggtacaggacttaacctctaataggaattcttcaccatcatcgttagtgaggagtaaatcaaagcgtgatgtcgccccatgtagttttaccgtatattcacgccgtgcaacgcgccattgttcccagccaggaatgagtttgttttcaatcaaatgctctgctacatcattgctataattcgtatcgagcatgataacaacgccatcacgttcaatgcctacaacgcgatacttcgtcttcgcatcaggcttatcatgaggcacgatgtacatcgtaacacctgtaaataacagttcccacatacgacctggatttggtaaatgagcaagtacgctttcaccattaagatccaaggtcaccacaaaacgattgggacgacctgtataagttgctttcaaaattgtatcgtatagaaccttcatcgttcctcctacatcaagataattctaggttcattatacaacaaaatgggccactccgaagagtggcccgctgggaggcgtcatatgacaggttccgaggctatcatatgaccagggataagatattcatcgcataacagcgatagttatgctaggcacagacaggatagagtcatctatgcattagcgatatgttgttttattgcaaatctttactttgcgtagatacttcactggcagaggtaaagcttgccaatggagcgtcgccagagcctaagattaccttgttcgctactagcgcattagctgccgttttagcttgctccaaagtaaggccagtgcgaggtccactaattgtgatcgatgcgcttttaccatcgactgtagcaaatttaagatataccacacgtttatcagccatgttgggcactcctttctaattcatatacataaggatgggaatgatcgcgataggtccacagggtttggattactacgaaccttcacgcagccattatgtgctaactattatgagtgaaagcacattaatgaccaagggatacttcgttgacgcgtattacgtcagcaatggtgttctcatagagaccagccaatgcggtaccgacgattttaaccgcatcatcagtagcttcttcagcgacgcgtgtgaaagtgacgtctttgtacttcggtttttcttccgtaccgatattaaaacgtaacactaactttgtgcgttttagttcagccatctgatcacctcctttcacctatatacattccaaaaggaggctcgtgacaagcaaattcgtttcaaaaagaggaataatatttttccccatgaaaaaacgaccccaaatcaaggtttagggccgtacttttgtatttagtttcacgtgaaacagggtcaaaaatttttgcttttttgtagcttgggacacattattttattgtaaaatgaattatactagtatatgtaatttgaaatgatgataacaatcatttcataacgatctcttactagctctctagaacatgtatcgtttggacgtacatcaccgtcgaaacgcatcatctctagcatgtgctaatagagactttcacagtgaaaatatatgatagaatataagtagttcattacaatttagaggggattacaatggctcaaatcgcaggaaatttacaacgaattaaaaacggccaacgccgttatgctattacaccgcgcattccagcgggttttattcaaccagatcaattgcaaaaatacattgatgtggcgaacaaatttggcgctgttcttaaactaaccggcagccaacgcattatgattacgaatttgaaagctgaggacgtagacgcagcgtgggaaatgctcggcatggagccggcgtacatggtgtccaaccgcgtgcgcagcgtcaagatttgccctggcacaacgttctgtaaacgggctaaacaagatagcgtgcatcttggcatgcagttggaacgcaaatatttgtcccaagaaatgcctagcaagatgaaaatcggcgtgtccggctgcattaattcttgtactgaaagccgcatgaaggacgttggcgttatcggttctgttgagggctggagcgtctacgctggcggcagcggcggtgcgcatccacgcattggtgacctcattgcagaggtaacaacagaaaaagaagcccttgcacttgtggaccgcatcatcgaatattacaaagcaaatgcacaaatcgaacgaatgggtgaattcatcgaccgcatcggcttagaggctttcaaagaagctgtactaggcgaccttgaaggggctcctacagaagtaaaagcagcagaacctattgttaacttgccaggtcacggcaatgatccagaggttgaaacgccacgccttgaaccaggtcaaccaattacaccggatacaatcatccgcgatatcgtagacatctatccaaatacagtacctgtactacaaagcatcggcatgggttgcctcggttgtccatcctctacgatggaaccactatggcaagccgctgaaatccacggcgtcaacgtgtacgatttacttaacaaactagaaactgcccgcaaaggtgcataattaatataaaggagtttcacatgtccgcatttttaggccacattcactactggttataccgcaaaatccaattgctcgtagagcgtgaaaacttaattcttgaaaaaacgacaaaggtcgtagatgaccttgctgaggaattgcattccatctccgtagatacatacggcgaaccaattaaccctagcattccattggaaaacattatcgaccataacaacattcacggttggctctccaaccaaatcaacatagcatccgtccgcgaagcggctttcatcaaagacatgctcgatacaaatgctgatgaaaatgctattcacgtagtaaccgctattctcgatgcctttgctgtacaaggtcaagcatgcggcgttgtggcccaagatagcctcgaagaacatacggcgccagccatctacaacgcccttcaaaacttctatgtaaacggcatgccttgcgacggcggcgaccaaatcgttgaggatagcgctgaccgtttcacatgggtcggcgatcaccgcttacaagctggctactggcgcactgcaggcgtagaccctaaattcatgatgctcgcataccaaacatggttcgaggcctttgtgaaagctatcgatcctgaattcgagcttatcaccaccgaagacaatggcacacgattatatacaatcgctaaaaaataaataccatttcgttcgctaaaacggacgaaaaccagacgaaaaacgactgaaaatgggcgaaaacgtgcaaaaaacgaacgaaagcgcgggcgtaaaattttacgctcgcgttttttatttctaatgatccaatatatgtgcctaaaaaattagaacaggcgtgttctattttaaaattccttataaaagtgtagctatagacacagaattgataagaaatatcagttataatagaaccataagataaatcattactcatatactttcagatataggaggtgcagcatcatggcaggcacagtaaaaaaagatctaggtttattattccaaggccctaactacgtaatcgtaaaaaaaggtggcaaagcaggcgaaaaggtagaaaaacataatcatcctgaagccaatgttatctttactgttgttaagggcacagttcaagtattccttaacgaaacagaggaacatgtactcgtaccaggtgaagttctcgaatttaatggcgataactacattcaagcaacgcttgttgaagatagcgaattcatcgtaaacctcgttcataaacctgaataagattatatagatatgacctcctcctctccttagtgtctatatataaaaaacacctataagtggtaagttatacaaaacagtaactattaccatatataggtgttttttacattcttagtcctaatatcttaatttcataactgtatttctatagaatatagtgtttttgcttgcagttgctttcataagagaatatactaattatgtaagagagaaagaaggatttacatgacacgcgaagatttagaaacctatattcacaatcaatttgaggatactaccaccaatactccttggacgcagttcccgcattacaaggtgtaccgccatcaaagtaatcataaatggttcgccctagtcatgaatattactaccgataaattaggatggtcaaacattcggcctatcgatgtgttaaacatcaaatgcgagcccaccatgattggtgcctttcgtaaggaaccaggcatatacgcagcctatcatatgaataaggccaattggctaaccatttctttggatggctctgtgcctactgaaagaataaaaatgctcctcgacatgagctatcgattgactaaataaaatactaaattctttatctgcccatttagcacataaaataaaacgagcctggattcattctaagctcgtttttttgctttcacgtattgtattgtttaatatttataaaataactttcacctatactcgtaacatcatagatgcacttattaaaagtacagtatatacaatagcaatgataataatatgcattgatgtagtctttaacatctgacggtagagtccaagggagcaaagcatataatatatagctaatacaaatgcgattaggcccaaaatagattgaactccgaacgcaatcatacccgctccggcaaggctcaatacaataacgagtacagcaccgagtaaggacaatacagttataggtaaatcaaaggccatcgcatacgaaacagccatgaacgtatccttaaacataagatcacgattactaatagctttcacataaaaatgggccaatatcaaccaaagcccttttaagaaaaaccaggcaaaaacaaagcctaaaatcgatataattgtatctaacacagttacaggcatgataagaaatatgataccattttccaccaccgacaaaccaagcataatgccaaacaaacgcaacataaaaactagcgcttgatcaaacgtaccattctccataatatacggaatccccttagaccgcggataccgcatcaaactccaacaaacctgcataaaagacatctacaaaacctccttcgccgccctcaattacaactaaatcataccataccataacaaaccaaccaacacaaaacaccctgcgtcccctctgtttcttagtctaaaaaaattaatatctatctctgatagggaaaacagccccctctcgaaaatcgacttactccttttcccctacagtctaaaaaaataatattttatccaaagagattagcgaaaaaagggatacccctctgaaaacgactttcccagatgctgtggattttccttaggaaaatcttacgcatctggattagcgatgtgtggctcccatacgtcgctacgctcctctgttagctcacaccctgcgtcggccctgctccttagtctaaaaaataatatctatctctgatagaggaaaacagccccctctcgaaaatcgacttactccttttcccctacagtctaaaaaaataatattttatccaaagagattagcgaaaaaagggatacccctctgaaaacgactttggccctgttccgaaggaacagacccggccggtggaggctttcagaggggtatcccttttaccacacgttaaaacgctagataagatattatttttttagacgtttaattacttcatctgtaatattttcaacgttactatttgcatcagctgcgcggattgtgtatgggtcgtctaatacaacgtccattttcttttcaacgcgaacggattcgatagcgttgtgaatgttttgcatcataggttgtgcaattttattcacttcgtcattttctttttgtaacaatggagctacggatttattgaattctgcttctgcttgagcttgatctttaattttgtcaatttcttgcattttcttttcaatttgtggacggtattgtgcatctacttgttgcattttcatgtcgagtgcaccgtaaccaggatagctatttacaacttgactcatttgcactaaaccaatgttagcagcgcttgccacagcagtggtagcggagatagcaccaacgatagccaatgttgtcaattttttagttaatttcatttgagatcctcctgaacagtaaagttccattacacaaacatgtaatgcactatttttactatatcaaatctaacttgctttcacaagtaaaaaccctcaaaaatcatagatgagatatagcatctaataattaaattgtatactattaaataataataagggcccatgaattcatcatgaacccttattaaaaatttactatctattattgttcgtcattaagatagatgtatttatcggatttcaatttggacacgaggtcaggcaccaagccgataaggcgatcaaagctattgctataaggattacctttaatgttgaacaactcgatgcgttcgcctttgatcacgagcacagcgcttggttccatgcgagcgccgccgccaccgccgccacattcatgattcttgccagatgtattgtggtttgtgccagtgccgaaaccaaatgttacgtccacaaatggaaccaatgtagtatcgccgatttgcaccgcttcacctactacagtttccaccttaatcatatttttgaacttctcaaaaaggacttctaaattttcttttacgttactgttctccatcgtagtacctccactgatgtcaactatgcgttagcggcttgttccgctttcaatcgttctaattctttcttttctttgcgcttaacccaaacgaccttgaccgtttcagctatgagtgcacgcattggttgtgaaagcacgaatcgcgtgccgtgccatgccaatgcgcctagaataatgcgccctttaatgtggccgctaccttctaaatgccaattcaaataatcaatctcgatatgttcagcctgttcaggccaaatactgtacaacatcgaagcaaacatgccacccttaaaaggatcaccgatgccgatacgcccttctacagcgatatctcgtggtttagaatggtcataacaccgcttagaaacaagcaacaattgacgccacaattccgtattcgtcacatgtttcatgaaccaaaaggtcgggattttcgatttaaagctagccactggatcattaggatctggtttttgaaagcgcgattttacgctatctttcaagccgtctattttcgtaaataccttctcttttacggtgccatcactattgaaagtaaccttttctaccacttcatcatcaggtttcatcgtcgggttatcgcgaattgaatcatattgtgctgcccgcgcttcagcacccttattatcatccttagatgtatcaacacgttcaacgcgaacctgtttaccttgtgcatctgatgcttgccctgcactgcgcgtagcatctaggctttcaccagaagcaccaacggtcgtcggctcagtcggttcagtaccgccctggccatcgccttgcatggctttcatcatcgcttccgcctgcgcagccatcggatcattttcaaattcgtcaacagccttctgatattcgtcatcaacccgttgttgaatccattcatcgtattctttcacagggcctattttctgcatacctaatacatacagttgtttaaaaaatggtttgccctgaaaatatgcgagatgcagcgacaatacgcgccacagccatttaaccgacaattctacgcggtacggcgtcctgccgttccattcgatgctatatgtgattggcgttagtaggataatcatgatcagcgctacgatgagaagcactacgacgagtgccacaatagcgactatactcaaccacatcacctccttaggttatgggatttgtgaaagtatactctaattttcaatgcccttgcgagccattacaccttgcatgtaataatgcttaacttccttcatttccgtcacaagatcggccacatcaagaagttcttgcggtgccccgcgccccgtaaataccacttcggtttccggattgcgagcctctaatagagcctccgtttttttccaatcaatgagttcaaagaacaaagccatgttatattcgtcaagaaccaccaaatcatagtcgccactagatacagcctctaacgcgcgttcatagcccttttcaataagcgctacataatccttaggcggatttcccgattcaaatacaaccacctcatcaccccatttggcgagctcatccttgctcttcatgccttccttgatgataaaaaacggtttacctacagtttctaatgtaatatttttgagggtcggtaaaatattatgttcactatacactttagacttcatgaactgtaaaaataaaacctttttgccagcgcctatagctcgtatagcgaggccgatcgcagccgtcgttttacccttgccttcgccggtataaacttgtacataggccttcatagatatacctccgttcatataccataattgtacaatatttatagacgaaaaggaatagatatcacatgaaagacaatcctaattatgcataagataataatatctattgatccattaattatattacctacacattggtgccaaacaagatgatgatggggccctaaatcctccaccggccaggtctgactacggccttcggccttcgcagggccaaagtcggatttagaaccccatcatcatcttactatctagcacttcaataatgtatgcttataaaataatagacaccaatacaatatccaatagatattattatcaacccaaaaggattatcccacatgtgatatctataccatcagtatataaacatgtaccaattatggtatatgaattactaccaacccagccgtttgggaagagatgtaatgaatacttgttacataggtgccttatagtgtatcccaaaaaatagaacaggcctgttctatttttaagacatatatattaggtactaagaattagaacccacctgttctatttttaaaacacatatactagattctcagaattagtacacgcctgttctattttaaaacacatatactaggtccccagaattagtacacgcctgttctattttttaaggcacatatattaggtactcagaattagaacacgcctgttctaattttttataaggcatatataagccaatctcgtacacttctttatcctaaattgtacaatggtattttatgccaattagtcaactaaatttagatagaaaagatagccccctccggaaaatgatttcgggctccgcataagcgcagtagcttccccactcccgccagtttagtaattagtaatacgccaaaagggatacccctgttcgaagacgacttcaggctctcccttatgctaagttgtacaatggtattttatgccaattagtcaactaaatttagatagaaaaaagatagacccctccggaaaatgatttcgggctccgcgtaagcgcagtagcgtatcattttccggaggggtctatcgactctatgtagttttaattactaattggcaaaaataccattggatcaaccgcggacccattaatccgtacttcgtagtgtacgtgtgcgccagtacttttaccagtactacccataagagcgatgacttggccttgttttacggtcatgcccggtgtaacgagaacggcgctattgtggccatagcgagtcacaaatccgttgccgtgatcgatttctacgaggttaccataaccgccttcggtgtagcctgcaaatgttacggtacccgctgcagtagcaacgataggtgtgccgtaatcgtcagcgatatcaacaccttcgtggaatgcgctagcagcaccggtcacaggatcgacacgagtgccataaggggatgtaataacacccttacttggccagatgcttggcgttgtactattcgtatatccaccagaacctgtggtgtagttcaattgttgcaatgcagcgatgtcttgagccccaccatcacgcaagatgtttcgcatcgtgtagaagctaaccaataatttttgtgcatccttatctaatttagatagtcttgctgaaagttgcgccgcacttagcgtgggactagtctcatcgctagcggcttcctgctttgggtcagagccatcgctaccaccttgagatggtgtgccggactcagcaccctttaacatttgtttattttcttcactaatttgatttaagttttggattttcttatccaacacttctgttttttgttgtaacagttttagttgttctgtttgcaattgtgtttgttgacgcaattgaacgatttctgcttgtcgtgcaatgccccaaatggataaaacaagtgctgctacaaataagattacggccactacagctacaatcttcgcttgtttatgactcaatgtaatggtgcaattatcaccattctgagacactacagaactcaaaatacttggtactttcaaaatgccttccttacttttaatcattcttcaactcatcatgcatgtgcgctctatatgaacacgacaaggtgatttgcctattgagaatggataacgcttgctaacgcttcctcattcgtacgttccccaagcgcttcatttaaactttctaattcctcttgtgaaagattaacgagacttttacctttcacaattggtttactgaaaatacgagagtcatttcggccatagatactggaaatgcaaaccccattattattgccatcaagcaatgtaagggcaaaggataaatcgttgccgatgttatcaaatgcattatacttcttaaagccgattttttgcaatgtgttgccttgaatattgcgaatttgagtttgttcctcaatcatatcctgcaatccctttgcggcctcgcgaatttcagtgatttctactgaaagtttacgttctaggctagtcccattttcaccttgcatgaagaaattgaacttcttcgttaagctccctaatctaatgtgtaggataatgcaatataccaataaaataacagctaatgcgcatcctaatacaccgatatagggttgtatagattctaacattcaaaaccctttctatctaattcgtccacaaacggactaatagcacgttctagtataccatgtaatgacgcaataagtacaccataattcacaataggcgtaccttgcacaacggcacaatcaatgcgccgtaacacctcgcgacgcgtcaacatacaagccccgcaatggatgataagatcataaccgctcacatccttagggaacgcgccaccgctggtaaattcaagctgtaaatccgtatgccccttctttttgagccacatcggaattttaacggttccaatatcatcgcattggcgacgatgtgtgcagccctcactgatgagcacacgcgcaccaggtttcaagttattaagggctttcacccccgttactaaatcctgcaattttcccttgaaccgagccattaagatggaaaatgatgttaatgggatatccgcaggcgtcaacgcattcaccgcttcaaaggcttgcgaatcggtaatgacgagttttggtttttgtgaaagcttaccgagcatggtcggtagctcttctgtttggcacaccaaggcaaggcctttatggtccaaaatctcacgaattgtctgaacctgtggcaagattagacgaccctttggcgccgccgaatcaataggacataccaaaatgatagtatcccctggatcaactaacccttgtaatagagattgctcgccttctacatcaagcggtgttaaccctcctagcaaatcgagcaatgtaagacgatcccgattcgatgtaaaatccgtagagcctacgacagtggcaatagcggacaaatcgggatacgcatctacataatttggattagtatcattaccattgctatcgttatcatgagtgcttttactatcaaaagtgttaatttcattgatgaataatgcgataggcacattgttttgttttaacttattaagccacatcatatcatcagcagtgggcgcttcatcattacgcaacacatagacagcgagattgatttttttgataatttcttcggatttttcaatgcgaagagcgcccagttccgatgtatcgtcaatacccgccgtatcggtaataactacagggcctagaggcaatatttccatagatttgctaacaggatcggtcgtagtgcctgccacctcagacacgagggatactggttgatccgttagcatattaattaaggtcgacttacccgcattacaacggccaaaaaagccgatgtgtacgcggttcgcctttggtgtttgttccattatacgcgaaactccattgtttcttcatgttctgtgctctcctgagcatccatatacgcaataagacgttctaattcagtttcagagctaaaggcaatttcaattttaccttgtaccttcttaccggctctaaatttaatagatactggagaacctaggctcaattttaaacgatctaccaatgcacgaacctcagctgtatcatgtggctctgtagtgtctttagacttagtctttttagacatcatggctttcacgagctgctctgcttggcgggcacttaattcgccctctttaatgcgctctgcggcttctacttgttgcgctgcactacgtagagccaacaaaggtcgagcttgaccaacagttaaatcgccttcaattaaatccttttgaacagatgcggctaatttcaaaagacgcatcatattggcaatatatgaacggctacgtccaaggcgtgcagaaatcatctcctgagtttgcttatacgtattcatcaaaccttgatacgccaaagcttcttcaataggatccaagccttcacgttggagattttctaccaaagcgacttctgtcatttcctctgtattataattttttacaactacaggtactgtttctaggcccaccatcaatgccgcgcgatagcggcgctcaccggctacgatttggtatttatccttttgcttgcgaacgacgattggttgaaagatacctaaattcttaatagattcagccaaagtagctaaactttgttcatcaaaattcttacgtggttgatcctcattaggaattacatcccctataggcaactcgtgaacttcacgttcaggtaaagccgtctctatggactgctctcccatcattgttgctaatgtttttcgttcctttttctgtttcatcgccataataatccccaatctattagtactttcacaccgcatatataaaatgctgcacaaaccaatatacagtttgtgcttacattacataatcatatttatttagtctattctataccaattatttcgttttcttagaatctcgaataacctctttagctaatttagtgtaaacagctgcgccctttgatttcgaatcatatacaataatcggttccccataacttggtgcttcactgaggcgaacatttcgaggaataattgttttatacaccttagtaccaaagaacgatttcacctcatctgccacttggacagacaagttagtacgtccatcaaacatagtgagtaacacaccctcaattacaaggtctttattagatgtttgttgcacgattgtaatcgtcttaacaagttgactaacaccttccaaggcataaaattcagtttgaattggaatcaaaacactgtcagccgctgtgaaagcattcaatgttagcaaaccaagagatggcgggcaatcaatgatgataaaatcatactcatcacgtacagaagcaatggattttttcaaaattgtttcacgtgaaacaatccctactaattctacttcagcaccagccaattgaatcgttgcaggcgctacaaaaagctttgaaagcattgtaggttgaataacattagcaatgtcttcgccatctatcaacacatcgtgaatacataattccaaatcatctttttcaatacctaatccagaactagcattaccctgcggatccaaatctattaataacacctttttacctgcatcagctaaacaagcactgagattaacagatgttgtagtcttgcctacaccgcctttttgattagtaatcgctattactttgcccacaaaattcacctcaactttacgttcaaaaatatttcatttcattataacatagggcacgcaaaagaaatagaactttataggtgtgaccatcatttttaaaataaaatctacaaacaaataagaatgtttcacgtgaaacattccaaaaacatatgttcactaacacgatataccagcttataaatttatttgattatgtgttatcacttaattgatttacaccattaggtataaaatgtttacgtataacttttttctatggacgcacctcaataaattatatgaagctatagtctttacagtatatatagatatatttatacttataaaagacagtattttaataggtttaagattttaaccatacaatctattttatttttaaaggaggcgtttcacatgcccatttataacggaatgcttcccgtcatcaacaaggatgaagtaaagcgttatgcaggacttcgtcatgccgaagattttccagaaaaattcgttgacgaagcttgtaaagaaatccaattattagcgacaccaaaaggtgtctaccaagaatatgattacgatgcggaaaataaagttattttaagtaatccaccgctcaaaattgaaggatccatcattgaaaaacatcttgaaaaatctacaaaggtgtatgtgctaggtgttacggtcggcgaagacgttgaaagacgtagcgaacagctattcaaacaaggcaactacacagtaggtctcttactagatgcggctgcaacaactgcagttgaacaagtggctgaccaagttaacgaggtaatcaataacattgctaagaaacaaggttatgcacctacatggcgtttcagcccaggctatggcaactggcctttagaaattcaaccacaacttggtaaaatcatcaaaaccgaacaaatcggactacaagttacagaaaacttcttattatttccaagaaaatccgtaacagctattatcggtttgatgccaggagatcaatgcttgacaacaaaacgcggttgtagctcttgctcacaaaaagattgccaatcaagaaaacttccagaaaaaacagcggctacaaaaccagaaacaagcaaaacaacagccgaaacatctggtatagctatgaaagcacaaccaacagaataaatttttaacacactatgtttcacgtgaaacattaccttgtacatctgtaccattgtacccatgtgcaatcaaaaatgtttcacgtgaaacaattcatttatagtattaataattgaaatatagatcaccaaggttctgagcccgactttgctaggtctaggccctcggccgacgaccgttaaggcggtggagggcgaatgtccttggtgacctacatttcaatatataaaggatgattcacatgtacatttttgacggcgctatgggtacaatgctccaagcagcaggcctagaagagggttattgcccagaattatttaacgtggaacgaccagaagtggtaaaaaatatccacgcacaatatttacaacatggtagtgatgtaattactactaatacatttggcgcatgcggccttaaattagaagattacgatttacaagatcgtgtaaaagaaataaatatagcagctgtaaaggttgccaaagaagcaatttcagagttcaagccatccgctcgtgtagccggttctatgggccctacaggacggtttttacaaccattgggtaatatgagctttgattctatttatgatacatatagagaacaagcagagtctttgattgaaggcggcgttgatttcatcattatcgaaacaattatcgacgtacaagaaatgcgtgccgctctattagcatctttggatgctcgtgaagcagcaggtaagactaaagaagatgtacaaattatctgtcaattttctttcagtgaagacggtcgtaccatcactggtacgcctccagaggttgccacaactatcgtagaggcaatgggggccgatatcatcggtattaactgttctcttggacctgaacaaatcacaccgcttattgaaaaaatcgctagtgttactaatttaccaatcagctgccaaccaaacgcaggtatgccacaactcattaacaaacaaacggtatttccgctttcagcagaagacatgggcccattgatgattccaattgttgatgctggtgcaagttatgtaggtggctgctgtggtacaacaccagcgcatattcaatcaatttctgacgctgtgaaagcacatacgcctaaggaacgtgctcatattgaaccaaaaacggtgattacaagtcgtacaaaattgcttgaattaggtcataatgttaaaccgttgattatcggtgaacgcattaacccaacaggtcgtaaagtgcttgctcaagaactacgggacggttctttcattcgtgtaaaacgcgacgccttagaccaagtagaagcaggtgcagatatcctcgatgtgaatatgggggtagccggtatggatcaaacacctttgatggaaaaagccatcttcgaattgtccatgcttgtagaaacgccattatccatcgatacattggatcctaaagccatggaggttgcccttaaaaactatccaggtcgcgcgcttatcaactctgtaaatggagaagaagagtccatcacacacgttatgccattggctaaacgctatggcgctgcattactttgcttgccaatctgcagtggcgatttacctgaaaaggctgaggatcgcgttgctttggctgaaagcatcgtaaatcgcgcatatggctatggtttacaaccgcacgacctcttgcttgatccattggtattaacacttgccagcggcgaagatagtgcacgacaaacgcttagcacattgcgtttatataaagaaaaattcggtttcccaactgttatgggcttatccaatatttccttcggcatgccacaacggccatatctaaacggtcaattcctaacaatggcccttgcatccggtttgactacaccaatcatgaatccgctcaactacgcagctaaaaaagcatttgtatcaagtaccacattacttggttgggacccaggttctgcagaattcattaaagaatatggttacgaagatgaaactacagcaccaggcaatgcggcaccaaaaggtccagataaagcatcctttgacagcaatgatccattagccaatatccgcgcttgtgtagaacaaggcgaaaaggaagccattgttgatcttgtaaaaaaagcattagctgacggcatggacccattggatattacgaaaaaagggctttcagaagccatgaacgtagtaggcgataaatttggctctggtaaattattcttaccacaagttatgcttgctgcggaaacgatgcaagctgctttcaacactatcaaagaaattattccagccagcgacagtttagataaaggaaccgttgttgtagccactgttaagggtgatattcacgatttaggcaaaaatatcgtagccgctttacttgaaaataatggttacaaaatcgtcgatctcggcaaggatgttgaccctgaggtcatcgtacaagccattaaggacaacaaggcggccctcgtaggcatttgttccttgatgacgactacaatgcctcaaatcgataataccatcgctgctattcgtgcagccggccttaaaacgaaggttatggttggtggcgccgtagtatcccaagattacgctgaccaagcgggcgcagatatttacgccaaggacggcatcgcggctgtaaaccacgcgaacgatttctttgaaactttgaaataatggctaatctaggcatataatataggtaatactcatggtgaaagtctaaaataatgttcacataacgcatatgaggctttcaccatacatagaatagataagaggtatatgatgacattacgtgagaaacaccaaaaaggccagttcaccatcaccgttgaattggacccacctaaaagcagttctgcccaaaaggtttttgaacaagcagcgcgcctaaaaggcaaggttgacgccataaacattgcggacagccctatgtctaaaatgcgcatgagccctatttccttgtcctatttattgcaacataatgaaggcatcgaaacgattttccacctcacatgccgtgaccgcaacatcataggcttacaatccgaactacttggtgctgcagcacttggtgttaataacattttgacactaacaggcgataagccagaccatggcgaccatccattcgcacaatccgtatttgaagtggactgcatgggcttactaaatattgctaaaacattgaacagcggtaaagatttagcaggtaatgacctcgatgaacctacgaacttctacattggcgctacaggcaatcctggtgctcctgatttagaaatcgaacgacaaaaactagctgctaaaatcaaaaatggtgcccatttcgttcaaacacaaccaatctatgatttagaacaagctaaacgctatatcgacaaaatgtctgaattcaatgtacctatcatgcttggtttgattcctcttaaaagctttaaaatggcaacataccttcatgaaaaagtacctggaatcaaccttacccaagacattctagaccgcgtagaaaaaggcggaaaagaagcgggtacagaaatcgccatcgaaaccttagaacaaatcaagaaaatcgctgcaggtgtacatatcatgccgcttaatgatataaatacgactttgcatattattgatcacgtgtaatacttttaatacaacaataaaaggaatgtcctcccaaaacctccaccggccgggtctgactacgcccttcgggcttcgcaggaccaaagtcggttttggaaggacattcctttttattcatttataagacattacacgtgattaaataatatgcaaatcttaaaagaacagggaacaaatcaaaattgatttgttccctgttttgttttcgatatagccgttagtattaatatgctacaatcttttcctatttattgttaccgataatataagtttaatctaaaaacacctttcaaaaaacgactttggccctgcggaggccgataggccggagtcagacccggccggtggaggctttttggaaggtgtttttagattgcttacattaatgaaaaagattgtagcatattataataacggtttatcctttatctcttttggttttctcggatatttcccaggtgttgttcctgttttcttaatgtacacgatagctcgtttatcgtctagtgtcggtaaggtcacggttcttacatcttcgatggatgcttttaatgtgctaagggctttatcagattcgccgacttcttcttcgtaaatagcgccttttaaggcgataacatagcctccatgtttaacgtagggcacggtccattctaataagatgggcaatcttgcaacggcacggcttgtggcgatatcaaagctttcacgatagtcctgatggctcaaatcttcagcgcgtccatgtaaggtcttgcagttcgtcaattgcaattcgtcgataacggactcaaggaaggtaaggcgtttcttgagggaatcaaacaaggtcacgtgcaaggttctgtcatagatggccaagggaatgccaggaaaaccagcaccagttccgacatcgataatgaaggatccagatttgataattttcgaatcataacaagatagagaatcaatcatgtgcttaaccacgacttctttcatatccgtaataccggtgaggttaagatatttatttgtttcaatcatgcgtgcatagtacacgtaaaaatcttttgcttgctgcagtgtgcatgacaatccaaatgctgccatttgtgaaagcatatattctacaaactcagattcactagcgataggcacatcatatttttctttcatcggtgctcctaactatatgtatgtaattcaggttaaaattcatttattcgcactgtaaggcctgtttatgtacttctaggataaattatatacaaaacacttaaaaaagagcatacaagcgaaatataagagtcatatttgtatctattataccatattctcaatatattctcatttattatatagataaaagtacaaaaagaggagttacgcataaaaatcttatatcacctaaaccgcctcataattgtaaacctattttgttagccttctaacacatacttttccaaatttatatatcttatttctaccttttaaatttttctgtttatctataatttatcactatgaacttttcttcacatataaattgttttgtctattctgaatgtacacttagtgtatttctctagtgtacatattttactagtagaataatatacattttataaatatttatataaatatacaaacttttacgtatatactcacttttacatttataaaaaataaagcttgctaatggtatcatttatagatacactacaatcaataggaggtgatacccatgaaacaaaaatgtatatggttcttatttaaacttgggctatccttatttactccagattatatgagtcaaggtcgcgaagtcaatgagcatcaggaacgggaaaccttataacagaaaaagctagttaatcaaacgattagctagctttttctatgtaatcacatattctatttgttcctattgtattgttccaattgaatcaacagtacagacacatccgccggagatacgccagagatacggctggcttggccgatggagtgagggcgaattttgttgagcttttgttgcgcttcaagggaaatacctttaatttctgtataatcccattcttttggaagaattttttcttccagtttgcgaaccttctcaacttgttccatttgctttttgatgtaaccttcataggtaatggcaatatccatagcttcttctacgtcaggtgtaaagcgtttcaaatcgaatgcatcagctacggtagcataggagagttcattacgttttaccaaatcatatgcgtggatgcctgttttgataggagctgtgcccaagctttcaagcaaggcttgcgtttccttggacggattgacaggtgtgttgcgcaacaattccatgccttcttcgatggccgcttttttagctgtaaatttagcccaacgatcgtctttcacaaggccaatttcacgacctttttcggtaaggcgcatgtccgcattgtcttgacgaagcaatagacggtattcactgcgacttgtcatcatgcggtacggttcgttggtaccttttgttacgagatcatcgatgagaacgccaatgtatgcttcggagcgagcaaggatgaaaggttccttaccttcaagccataaagcagcattaataccagccatgaggccttgtgcagccgcttcttcataaccagatgtaccattagcttgaccagcagagtagaggccttcaatatgtttcacttgaagggctggcgtcaattgtgttgggttcaagcaatcgtattcaatagcataggcaggacgcatgatttcgacgttttcaagaccaggaatggtgcgaaggaatgcatattgtacgtccataggaagggatgtactcatgccttgtacatacatttcatttgtgcccattccttctggttctacgaataattgatggcgttctttatcggcaaagcgcaccaccttatcttcgatggaagggcaatagcgcggaccaacaccttcaattttaccgctgtacataggagcacgatgaatattgcttttaataatctcatgcgtttccttattcgtatacgtcaaccagcacacatcttcgttgcggttgatccattcgtccataaaggaaaaggcatgatgatgtgcatcgccttcttgaacggccatattttcaatattaagcgtccgtttatctacgcgagctggcgtgccagtcttaaagcgcatcaattcaacgccattatctagtagggattgagaaaattgttccgctacccgttgcccatttgggccacctacatagtcgatatcgccgatgaggattttacctttcaaataggtccctgtacaaagaatgacagccttagcgccatagaattcgccaagctcagtaacgatgcccgttaccttgccatcctcaaccttgagctccgtaaccatgatttgcttaacattgagattatccgtattttccaaagtatgtttcatcaaatgttgatatttaattttatccgattggcagcgcaaggaatgcacggcagggcctttacccatgttgagcatacgcatttgaatggccgtagcatccgcattgatacccatttgaccgcccaacgcatcgagctcatacacaagatgacttttaccagggccgccaacggcagggttgcacggcataagtgcaatattatccaaactgatggtcgccatcaacgtgcgatgacccatgcgggcgcaggcgagggccgcctcacaaccagcatgaccgccaccgatgacaatgacatcataattatctacagtatacatatctattgaattccttatatttattacttattttgaaatgtatatggaatgataacttccaaaaaactccaccggccgggtctgacttcggcctacggccttcgcagggccaaagtcgttttttgaaagccatcattccatatctacattacttaccgagacaaaatctactaaataattcatctatcatgctttcacgaattgtatcgcccgtgatgtcgcctagtagttcccaggcgctgcgcaaatcggtagcgataaagtccaccggcatgcccatgtcgatggaggatagggcttcttcgacttgagccttcgcttgttccatgaggctgatgtggcgcacgttactaatcatggcgctgttgtcttgctttacgcgaccgccgtagacgagttcttgcacccatttggagagaactgcagatccttcgccatctttggcactgatgcgttcgatagctgtaaaagtcccgtgttctttaatattttcgtctgtaacgacttgtgccacatcggacttattgaggagtacgatggtattcaaaccgctcatagaggtcaaaatttcgatttcttcagaggtcaatggggtagacccgtcgataacgcagagcacgatatctgctttgttgatataatcgcgagcacgctccacaccgagggcttctaccgtatcttgtgtgtctcgaatacctgccgtatcgatgaggcgcaatgaaatgccttctacggtcatatattcttcaatactatcccgcgtcgtccccggaatatccgttacaatagcgcggttttcgtgcaaaagagcattcataaggctcgatttacctgcatttggacggcctacaataaccgtcgtaataccgtcgcgaataagacgacctgtgttcgctgtggacaagagttcatccatagctttcaaaataggctgtaattgatcgcgaacctcttggctcgttacatcctcgatatcctcctcaggatagtcgatagttacctctaaatgagcaatcatggcgatgagctgttcacgcacatcttttacaaaggacgaaacggtgccgtccagctgcgatacagcgagagagagtgagtcctctgtttttgcttcaataatatcaacgatcgcctccgcttgggtgaggtcgatacgtccgttcataaaggcacgcttcgtaaattcaccggcctcagccatgcgcacatcgtgattgacgagcaatttcaagatttgtcgaaccggcacaataccgccgtgacactgaatttctaccacgtcttctgcggtgtaagaatgagggcctttcattaataacacaagaacctcgtcgatggtcttgttcgttgcagggtccacaatggttccgtattgaatcgttctgttttggcggtccatcaacggaaccttgccagcgctcttgaacaggctatttacaataggaaaactatccttgccgctaacacgaataataccaaccccgccaatgccgggcggcgtcgcaatggccgctattgtatcatctatatacataaaaatctccgtacttcgaatctctttaatttcttcgcctgtgaaagttaaactaaaccaatcttacccatgcgaagattaccttaagttagctttcaccataacttattgattgcgataacgatggtgttccaaaacctccaccgtacctatattagaaattagaaaagtgatgccagtattccgaaaccgactttggccctgcgaaggccgtaggccggagtcagacccggccggtggaggttctcggaatacaggcattactatcattatttcttatatgaaatcacaatgtgacggaatggttcatcaccagcggattctgtgacgatgtgtttatcatcatgcaacgccgtatgaatgattttgcgttcaaatgcattcataggttctaaggaaaccttttgacggttacgttttaccttagctgcaaggcgttttgcaagattgatcaacgtttcttcacgacgagcacggtaattttccacatccaccacgatgtgacaatggccagacacctctttgtgagccaccaaattcgttaaatattggatagcatcaagggtttgaccgtgtttaccaatcaagataccaaggtcttcaccatgtacttggaacgtgattttatcactggtaaacatcttttcaatcatcacgataaggcccatttgagcaaacatcttttcaaggaattccttacctttttcagcgatgatttgttgtgtttcttttgaaagctcttgtttagctttcacagataccggtgaatcatcaacagattcagccacatcgcgttcatcagtcgcaacaggcacatccgacacagcatcagaagtctcagcgatgacttctttttcttcttccgtagccgcagctgctaccattgtatagaacaaacgaaccacagctggtttacgtccaatacctaaaaaaccattagaaggttgttcaataacctttgtttctaccaattcacggccatctatagaaagttctgcaacccctttagcgatggcatcttcaatcgttttagcagatacatcgataaattccatagtgcctcctatttattagcttctaagcctttgtaaatgaaatgttgttgcaccaattggaacacattggatacaatccagtaaataacaagaccagatgggaagttcaaggaaatgtaaccgatgaacaatggcataaagatttgcataatcttttgttgttgtgcagcggcaccactagcacccataccagtttgtcgggacataagccatgtggacaaagcactcaatactggcaaaatgtagtatggatctgcttcgccaaggctaggaagccataagaaatgttcgaattcaggattgtaaggatatccttgcaatgcgtagaaaatagcaatcaaaaacggcatttgcaccaataaaggcaagcagccagccaatgggtttacgcccatttctttgtacatagcgcccatctcagcttgtaaacgttgagggtcgtttttgtatttttcttgaagctctttcatgcgaggttgtaactcttgcattgctttcatagatttaatttgttttactgtcaacggcgctaaaattgctttaataatgacagtaatgatgataatagccaccccatagcttgggaagccgaccatgtcagtgaagttgaaagcatatgtcacaagtgtgcgcataaattcaactaaatagttaaaaatttccattgtttctccttcgagtgcaggtctaaattgggtttcttcgcgcatccatatatcgttatggtatggtctaaatttcatccatacagatgctcaggcatttccaaaactgtgctcgctcaaactaatgtcaattgtgaaagttgtactagtcttatctttcaccaataccaaattaaggaacgggatcatacccgcccttgtggaatggatgacaacgcaaaatgcgttttagcccaagccagctacctttcaaaggaccatatttttcaatagcctgcagagtatatgcggaacaagtgggataatatcggcaacatcccggtttgagaggggaaatggcaatctgatagaagcgaataacgagccataaaacaaaggtaacccctcgttttataagatttaataaagttatacatgtatctttcatagaattcaccatgattggattagcgtatgtatctaagacatttccaccaaatccatatacctcataatacgcgaataggaccaaagcatagcgctgtccatgcttgtggtcctatataggattatactaagagcttgcttttacgcaataagtacagtatttccttttccgctcgttcataggttgcgtccttcagagggccacgtccaacgataacaatatgatacccttcgcgaatttgatgctgattgaggcgatatacctctttcataaggcgacgtgctcgattgcgttcaaccgcacaacccacctttttacccgtcacaaatccgatgcgagtcttttgcttcgctacaggcatacgatataacacacataggcgtcctacctcgtacttaccatgcttatacacaaggcgatattcattattgtttataatacgtctcgttttatctaagcggtaatccattgtatcgtccgagtcctatagaatagaaaaacttggcaagagcgccaagttttctgaaagctcttgctgagccattatattatgcagataagcgttttctgcctttagcacgtcttctttttaatacgagacggccaccgatagttttcatgcgttcacggaaaccatgggtacgttttctccaaagagtatttggttgatatgtacgtttcattagtaaaacacctcctcgttatatatttgttttacttataccataacagggtaattatagagggaaaacgcaaatctgtcaataaaaaacagggttttctatatatatttatctagagtaatcaaacatttgtgacaaatacctatgccttttgattcataaagtactctgttataacttggtttggtgatttaaagtttaagactttttgtgcaatgttattatatctattagcatatcgactatgtgcttttagaaaactctccatactattaaacttacgagaataaaatctctcactatcaattcgatgactgcgctctacctttccattctgccacggagaaaatggtcttgtcgttttatgctctatttctaatctttttaatacaatatcaaataaacactctcgatcttttactccatagtttgtaaattcacgaccattatctgtttgtattgtatgaataggaaatcccattttggcttctaaatttaataagaaccgacttgtattagtaacacttttttcatctataatttttagaattctctttctagaaaactcatcaatagctgtaagttgatagtaagattttccttgtgttgaaaaggctaaactctcgcgaggtacgtattttatatcaatctgaaccttttctcctggatatgttactagatctggtttccacttgctttttggaacagatttaacaacctttttctctttaatgtgacaccttatttgtcggcacatagagccatatgagcgtttataaccacgcttttttgcctcaacatatacttgagacagcccttcatgtttaaacttagaatgcatacgcttgataagtgctagttcttcctcagtgtgttgattaggatgagaatgtggtttacgactatacaatcgaagtgaatcgatagtcccgtcgaaacgcttcacccaacgttgtacttgttgtctactagtatgataacggcgtgcagcttcagcattatttccatactttatagcatattcacatactcgtttacgaaatcttaattcttcagttataatagaatgcatgagaaggaactccttttgttgtaatgtttggattaagcaacttcattataacagagttccttctcattttttattcacttgtcacaaatgtattatactcttacaaaacagggttttctatatatatttatataaaaaagatatggtgtttcgattaaaatctacaaatgtaatttgtttgccagtaatattactacatttaagtaatgatggctgcctaatattttctcgctccaccggccgggtctgactccggcctacggcctccgcagggacaaagtcgctgcaaaaatattaggcagccatcattaaacaatattcattaattagccaaacaaattacaccattcacatcttatcaagacaccatatcttttttatctgaaccttatagatcaactcctgttttttattgaaacagattgcgcgcaccttcccttggcggggaagacagaatctactattttagagcaacatacatatacctattttgaattagtacacgcctgttctattttccggaacaccctatacacatacctattttgaattagtacacgcctgttctttttttcggaacaccctatacacatacctattttgaattagtacacgcctgttctatttttcggtacaccctatacacatacctattttgaattagtacacgcctgttctattttccgaaacaccctatacacatacctatttcgaattactacacgcctgttctatttttcggaacaccctatacacatatctattttgaattagtacacgcctgttctatttttcggaacaccctatacacatacctattttgaattagtacacacctgttctattttccacaacaccctatacacatacctattttgaattagtacacgcctgttctattttccgaaacaccctacttatgtccctgcagagcccacaaggcgaagacagacccttttccctttccgccaatttataatttctttactcagcacttaatagatattgagaaggttaagagggtgctttcgcagcgactttggccctgcgaagcccgaagggcgaagtcagacccggccggtggagcgagagagtcccctcttaaccttcaaagaatctatcttattatgctgagtaaagaaattataaaaaagttatccacagattgaatgacaatcttcctcatttttggtacaatcataattgaaattggtaaaaaatatatatttttataagtttttttcggatagtttagaaaagttatccacattttttctcttttgacctgtgaatagtataaactcagtatttataaggttggaagggaattttattttctcttattcacaagttgtgcacaggttattcacaggcatttgtggtttttccacagttttagaataagttatgcacataataacgaaagttatacacatttttagtaaaagttatacacaagaggaacaaa

SEQ ID NO: 335 - DNA, 1440 bp, Veillonella atypica
  source 1..1440: mol_type = genomic DNA
tccagctgttgcatacgctttaaagtttgacaagcctattctgacaagcagaatagttgcgttagaccctgtattcttaacgcagagtactctgagatatacaggatgttgaggggttcggcagtctagcgaagtctgactgctgatccaactcaacatgattattgaactagcaaattcaagatgagtttaataacaaatctaacaagctcgtcatatgcagcattaagagttatgaaagctagagcaattaaaaagtgattttttttattcataaggaattctccgtgagaactaaactaacatcaaaattaatgttcacggatatattacggagaaaaaattttttaatgacaaaaaaaataaaaaaaaacagaatgcccatttaagcgtttctggtacagcaccaaaaacacaatgggtaactccgttaaggctcgtttcactcgattgccttcggcaatatttttttgaaatttttttatgtgtttttttctaattcttgcatctgaaagatgccatattttcgtaatttatttattacgaaaatctcatttttttgttttgaaaaaacgaaatgtgtaaatgagcattagcgaatttttgaaattgcggtacgcaattttttacttgctgaacagcaagcccacgaacaggttaaaaaagtgcagataaaacctagttttattctgaaacttttgacctgtgtaagtgggcattccctattttttagaaaatgcggttaaaaccgcattaaatctatgctcatggcttttcgaaacgaaaagggtaaatgagcattgaaaaaaatttgaaatttcgcccataagccgtttttgaattttgaccgcacaaactatttttgaaatcaaaaaaagcccttagagggcaaaattttgaattatagcggtaaaaatattcataagtagttgactaggtgagatgaatagttatacaatcacctcaaatacaacaaaaaaaaagcagtgattgtaatcgcacgccaatgcgaactacaatcccaacacatggtaattcgaggttaccgcatgtcagttttaactgcttattgtttgtaggtagatactatcaaacaataagaaaaaaggcaagagcgtacaagtcgatcaccaacgtgttggtggtcgacttttttagttttcatagtacagaagtgccgagatgcgtaaccactttcaaaagtaacatccacgcttacaccgtgtagatagccgttagagggtgataggcttaggtgactatcgaccgtgaattattgttacattcaaaatggtgggggcggaacgtccaggtgtggcgttcttgacttgtggactggactgcaaattaacaatcaagaactctatacagcgacagcatacagctgttactgttgcccgttgtaattcaacgcaacgggcaacctctgccagctcctgc
